(19) United States
(12) Patent Application Publication
(10) Pub. No.: US 2025/0207131 A1
(43) Pub. Date: Jun. 26, 2025

(54) MODIFIED RNA AGENTS WITH REDUCED OFF-TARGET EFFECT

(71) Applicant: Alnylam Pharmaceuticals, Inc., Cambridge, MA (US)

(72) Inventors: Shigeo MATSUDA, Cambridge, MA (US); Mark K. SCHLEGEL, Cambridge, MA (US); Maja JANAS, Cambridge, MA (US); Vasant R. JADHAV, Cambridge, MA (US); Martin MAIER, Cambridge, MA (US); Klaus CHARISSE, Cambridge, MA (US); Muthiah MANOHARAN, Cambridge, MA (US); Kallathottathil G. RAJEEV, Cambridge, MA (US); Jayaprakash K. NAIR, Cambridge, MA (US)

(73) Assignee: Alnylam Pharmaceuticals, Inc., Cambridge, MA (US)

(21) Appl. No.: 18/968,749

(22) Filed: Dec. 4, 2024

Related U.S. Application Data
(63) Continuation of application No. 17/055,710, filed on Nov. 16, 2020, now Pat. No. 12,247,203.
(63) Continuation of application No. 17/743,663, filed on May 13, 2022, now Pat. No. 12,275,938.
Application No. 17/743,663 is a continuation of application No. 17/055,710, filed on Nov. 16, 2020, now Pat. No. 12,247,203.
(60) Provisional application No. 62/672,405, filed on May 16, 2018.
(60) Provisional application No. 62/719,291, filed on Aug. 17, 2018.
(60) Provisional application No. 62/672,405, filed on May 16, 2018.
(60) Provisional application No. 62/719,291, filed on Aug. 17, 2018.

(51) Int. Cl. C12N 15/113

(52) U.S. Cl. CPC C12N 15/113; C12N 2310/14; C12N 2310/318; C12N 2310/323; C12N 2310/33; C12N 2310/344; C12N 2310/53

(57) ABSTRACT

One aspect of the present invention relates to double-stranded RNA (dsRNA) agent capable of inhibiting the expression of a target gene. The antisense strand of the dsRNA molecule comprises at least one thermally destabilizing nucleotide occurring at a seed region; the dsRNA comprises at least four 2′-fluoro modifications, and the sense strand of the dsRNA molecule comprises ligand, wherein the ligand is an ASGPR ligand. Other aspects of the invention relate to pharmaceutical compositions comprising these dsRNA molecules suitable for therapeutic use, and methods of inhibiting the expression of a target gene by administering these dsRNA molecules, e.g., for the treatment of various disease conditions.

### RELATED APPLICATIONS

[0001] This application is a continuation under 35 U.S.C. § 120 of copending U.S. application Ser. No. 17/055,710 filed on Nov. 16, 2020, which is a 35 U.S.C. § 371 National Phase Entry Application of International Patent Application No. PCT/US2019/032633 filed on May 16, 2019, which claims benefit under 35 U.S.C. § 119(e) of the U.S. Provisional Application No. 62/672,405, filed on May 16, 2018 and the U.S. Provisional Application No. 62/719,291, filed on Aug. 17, 2018, the contents of all of which are incorporated herein by reference in their entireties.

[0002] This application is a continuation application under 35 U.S.C. § 120 of copending U.S. application Ser. No. 17/743,663 filed on May 13, 2022, which is a continuation of U.S. application Ser. No. 17/055,710 filed on Nov. 16, 2020, which is a 35 U.S.C. § 371 National Phase Entry Application of International Patent Application No. PCT/US2019/032633 filed on May 16, 2019, which claims benefit under 35 U.S.C. § 119(e) of the U.S. Provisional Application No. 62/672,405, filed on May 16, 2018 and the U.S. Provisional Application No. 62/719,291, filed on Aug. 17, 2018, the contents of all of which are incorporated herein by reference in their entireties.

### SEQUENCE LISTING

[0003] The instant application contains a Sequence Listing which has been submitted electronically in XML format and is hereby incorporated by reference in its entirety. Said XML copy, created on Mar. 13, 2025, is named ALN-283_ST26.xml and is 6,090,752 bytes in size.

### FIELD OF THE INVENTION

[0004] The invention relates to RNAi duplex agents having particular motifs that are advantageous for inhibition of target gene expression by reducing the undesired off-target effects, as well as RNAi compositions suitable for therapeutic use. Additionally, the invention provides methods of inhibiting the expression of a target gene by administering these RNAi duplex agents, e.g., for the treatment of various diseases.

### BACKGROUND

[0005] RNA interference or “RNAi” is a term initially coined by Fire and co-workers to describe the observation that double-stranded RNAi (dsRNA) can block gene expression (Fire et al. (1998) Nature 391, 806-811; Elbashir et al. (2001) Genes Dev. 15, 188-200). Short dsRNA directs gene-specific, post-transcriptional silencing in many organisms, including vertebrates, and has provided a new tool for studying gene function. RNAi is mediated by RNA-induced silencing complex (RISC), a sequence-specific, multi-component nuclease that destroys messenger RNAs homologous to the silencing trigger. RISC is known to contain short RNAs (approximately 22 nucleotides) derived from the double-stranded RNA trigger, but the protein components of this activity remained unknown.

[0006] One of the off-target effects of siRNA is the miRNA-like effect—the argonaute protein, the core effector in RNA interference, treats siRNA, which is artificially introduced in order to induce RNA interference, as a miRNA (microRNA). (Lam et al. (2015) Molecular Therapy Nucleic Acids (2015) 4, e252). The miRNA recognizes a target gene majorly through base-pairing between the seed region (positions 2-9 from the 5′ end) and the target mRNA for gene suppression. The off-targets caused by siRNAs originate from base-complementarity of the seed regions of the RISC-loaded antisense strand of siRNA with one or more mRNA. The miRNA-like off-target effects in siRNAs have been reported in several studies, and affect expression of multitude of genes depending on sequences of the seed regions and are serious enough to cause up to 30% of the positive hits in siRNA based phenotype screening. Additionally, in the case of miRNAs, they are also reported to silence target genes through compensatory pairings within their 3′ end regions (3′-compensatory pairing) when the interactions between seed region and targets become weak, implicating that the miRNA-like off-target effects are likely to be mediated by such mechanism.

[0007] There is thus an ongoing effort to eliminate or reduce miRNA-like off-target effects of siRNAs by modulating siRNA design by judicious application of chemical modifications without compromising the gene silencing efficacy of siRNA gene therapeutics. This invention is directed to that effort.

### SUMMARY

[0008] This invention provides effective nucleotide or chemical motifs for dsRNA molecules, which are advantageous for inhibition of target gene expression, while having reduced off-target gene silencing effects, as well as RNAi compositions suitable for therapeutic use.

[0009] The inventors have discovered inter alia that dsRNA molecules where the antisense strand comprises at least one thermally destabilizing modification of the duplex within the seed region (i.e., at position 2-9 of the 5′-end of the antisense strand, counting from the 5′-end) and the dsRNA molecule has a melting temperature in the range of from about 40° C. to about 80° C. can be more effective in mediating RNA interference than the parent dsRNA molecule lacking the destabilizing modification. In some embodiments, the destabilizing modification is selected from the Modified Unlocked Nucleic Acid (mUNA) and Glycol Nucleic Acid (GNA) building blocks described in Examples 1-3 herein. In some embodiments, the destabilizing modification is selected from the group consisting of GNA-isoC, GNA-isoG, 5′-mUNA, 4′-mUNA, 3′-mUNA, 2′-mUNA, structures of which are as follows:

[chemical structure]

wherein Base is a modified or unmodified nucleobase and the asterisk on each structure represents either R, S or racemic.

[0010] In some embodiments of the various aspects disclosed herein, the destabilizing modification is 2′-5′ RNA, i.e., Mod 8. In some preferred embodiments, the destabilizing modification is present at position 7 of the antisense strand (counting from the 5′-end) when the destabilizing modification is 2′-5′ RNA.

[0011] In some embodiments of the various aspects disclosed herein, 5′-mUNA is 5′-(S)-Me-UNA (Y95) or 5′-(R)-Me-UNA (Y97), structures of which are shown in FIG. 32. In some embodiments of the various aspects disclosed herein, 2′-mUNA is 2′-(S)-Me-UNA (Y96) or 2′-(R)-Me-UNA (Y98), structures of which are shown in FIG. 32. In some embodiments of the various aspects disclosed herein, 3′-mUNA is 3′-(S)-Me-UNA (Y99), 3′-(R)-Me-UNA (Y100), or 3′-(R)-Me-4′-(S)-hydroxymethyl-UNA (Y102) structures of which are shown in FIG. 32. In some embodiments of the various aspects disclosed herein, 4′-(β)-OMe-UNA (Y101), structure of which is shown in FIG. 32.

[0012] In some embodiments, the dsRNA molecule further comprises at least one thermally destabilizing modification selected from the group consisting of GNA, 2′-OMe, 3′-OMe, 5′-Me, Hyp-spacer, SNA, hGNA, hhGNA, mGNA, TNA and h′GNA (Mod A-Mod K), structures of which are as follows:

[chemical structure]

[chemical structure]

[chemical structure]

wherein B is a modified or unmodified nucleobase and the asterisk on each structure represents either R, S or racemic.

[0013] Exemplary Hyp-spacer nucleosides include the following:

[chemical structure]

[0014] Exemplary TNA nucleosides include the following:

[chemical structure]

[0015] Also provided herein are monomers and phosphoramidites of the destabilizing modifications. For example, monomers and phosphoramidites can be selected from the Modified Unlocked Nucleic Acid (mUNA) and Glycol Nucleic Acid (GNA) building blocks described in Examples 1-3. In some embodiments, monomer or a phosphoramidite thereof is selected from the group consisting of GNA-isoC, GNA-isoG, 5′-mUNA, 4′-mUNA, 3′-mUNA, and 2′-mUNA. Also provided herein are nucleic acids comprising one or more of the mUNA and/or GNA monomers described herein. Without limitation, a nucleic acid comprising one or more of the mUNA and/or GNA monomers described herein can be single-stranded, double-stranded, partially double-stranded, hairpin or a circular nucleic acid.

[0016] In one aspect the invention provides a dsRNA molecule capable of inhibiting the expression of a target gene, comprising a sense strand and an antisense strand, each strand having 14 to 40 nucleotides, wherein the antisense strand has sufficient complementarity to the target sequence to mediate RNA interference and wherein the antisense strand comprises at least one thermally destabilizing modification of the duplex within the seed region (i.e., at position 2-9 of the 5′-end of the antisense strand, counting from the 5′-end), and the dsRNA further has at least one (e.g., one, two, three, four, five, six seven, eight or all nine) of the following characteristics: (i) a melting temperature (Tₘ) of from about 40° C. to about 80° C.; (ii) the antisense comprises 2, 3, 4, 5 or 6 2′-fluoro modifications; (iii) the antisense comprises 1, 2, 3 or 4 phosphorothioate internucleotide linkages; (iv) the sense strand is conjugated with a ligand; (v) the sense strand comprises 2, 3, 4 or 5 2′-fluoro modifications; (vi) the sense strand comprises 1, 2, 3 or 4 phosphorothioate internucleotide linkages; (vii) the dsRNA comprises at least four 2′-fluoro modifications; (viii) the dsRNA comprises a duplex region of 12-40 nucleotide pairs in length; and (ix) a blunt end at 5′end of the antisense strand. In some embodiments, the destabilizing modification is selected from the mUNA and GNA building blocks described in Examples 1-3 herein. In some embodiments, the destabilizing modification is selected from the group consisting of GNA-isoC, GNA-isoG, 5′-mUNA, 4′-mUNA, 3′-mUNA, and 2′-mUNA.

[0017] In some embodiments, the invention provides a dsRNA molecule capable of inhibiting the expression of a target gene, comprising a sense strand and an antisense strand, each strand having 14 to 40 nucleotides, wherein the antisense strand has sufficient complementarity to the target sequence to mediate RNA interference and wherein the antisense strand comprises at least one thermally destabilizing modification of the duplex within the seed region (i.e., at position 2-9, preferably 3-8, of the 5′-end of the antisense strand, counting from the 5′-end), and the dsRNA further has at least one (e.g., one, two, three, four, five, six seven, eight or all nine) of the following characteristics: (i) a melting temperature (Tₘ) of from about 40° C. to about 80° C.; (ii) the antisense comprises 6, 7, 8, 9, 10, 11 or 12 2′-OMe modifications; (iii) the antisense comprises 1, 2, 3 or 4 phosphorothioate internucleotide linkages; (iv) the sense strand is conjugated with a ligand; (v) the sense strand comprises 6, 7, 8, 9, 10, 11 or 12 2′-OMe modifications; (vi) the sense strand comprises 1, 2, 3 or 4 phosphorothioate internucleotide linkages; (vii) the dsRNA comprises at least 1, 2, 3, 4 or 5 2′-deoxy modification(s); (viii) the dsRNA comprises a duplex region of 12-40 nucleotide pairs in length; (ix) a blunt end at 5′end of the antisense strand, wherein the destabilizing modification is selected from mUNA and GNA building blocks described in Examples 1-3 herein. In some embodiments, the destabilizing modification is selected from the group consisting of GNA-isoC, GNA-isoG, 5′-mUNA, 4′-mUNA, 3′-mUNA, and 2′-mUNA. In some further embodiments of this, the dsRNA molecule further comprises at least one thermally destabilizing modification selected from the group consisting of GNA, 2′-OMe, 3′-OMe, 5′-Me, Hy p-spacer, SNA, hGNA, hhGNA, mGNA, TNA and h′GNA (Mod A-Mod K).

[0018] In some embodiments, the dsRNA has a melting temperature with a lower end of the range from about 40° C., 45° C., 50° C., 55° C., 60° C. or 65° C., and upper end of the range from about 70° C., 75° C. or 80° C. In some embodiments, the dsRNA has a melting temperature in the range from about 55° C. to about 70° C. In some embodiments, the dsRNA has a melting temperature in the range from about 57° C. to about 67° C. In some particular embodiments, the dsRNA has a melting temperature in the range from about 60° C. to about 67° C. In some additional embodiments, the dsRNA has a melting temperature in the range from about 62° C. to about 66° C.

[0019] The inventors have also discovered that dsRNA molecules having a melting temperature of at least 60° C. are more effective in vivo and in vitro. Thus, in some embodiments, the dsRNA has a melting temperature of at least 60° C.

[0020] The inventors also discovered that for the dsRNA molecules to be more effective in vivo, there must be at least 40-50% of the antisense strand present at day 7 in vivo, for example in the mouse liver, after administration.

[0021] In another aspect, the invention further provides a method for delivering the dsRNA molecule of the invention to a specific target in a subject by subcutaneous or intravenous administration. The invention further provides the dsRNA molecules of the invention for use in a method for delivering said agents to a specific target in a subject by subcutaneous or intravenous administration.

### BRIEF DESCRIPTION OF THE DRAWINGS

[0022] This patent or application file contains at least one drawing executed in color. Copies of this patent or patent application publication with color drawing(s) will be provided by the Office upon request and payment of the necessary fee.

[0023] FIG. 1 shows some exemplary destabilizing modifications of the invention.

[0024] FIG. 2 shows other exemplary destabilizing modifications of the invention.

[0025] FIG. 3 is a bar graph showing that incorporation of GNA-isoC into seed region of antisense strand is better tolerated than GNA-C in HAO1 sequence.

[0026] FIG. 4 are graphs showing that incorporation of 3′-RNA into antisense seed region leads to position specific reduction in off-targets in dual luciferase assay.

[0027] FIG. 5 is a bar graph showing that incorporation of 3′-RNA into antisense seed region is well tolerated in vivo (HAO1 sequence).

[0028] FIG. 6 are graphs showing that incorporation of Mods 5-7 into antisense seed region is well tolerated in vivo (TTR sequence 1).

[0029] FIG. 7 are graphs showing that incorporation of Mods 5-7 into antisense seed region is well tolerated in vivo (TTR sequence 2).

[0030] FIGS. 8 and 9 are schematic representations of exemplary siRNAs containing acyclic/non-natural nucleoside amidites (FIG. 8) and naturally-occurring base modified nucleosides (FIG. 9).

[0031] FIG. 10 is a scheme showing exemplary copper free “click” chemistry linked Bis-RNAi constructs.

[0032] FIG. 11 is a graph showing F7 knockdown with “click” linkers.

[0033] FIG. 12 is a graph showing TTR knockdown with “click” linkers.

[0034] FIG. 13 shows the structure of threose nucleic acids (TNA) and ribose nucleic acids (RNA).

[0035] FIG. 14 is a graph showing the stability of TNA modified oligonucleotides against 3′-exonuclease. FIG. 14 discloses SEQ ID NOS 667-669, 668, 670, 705, 671, 706, 667-669, 668, 670, 705, 671 and 706, respectively, in order from top to bottom, left to right.

[0036] FIG. 15 is a graph showing the stability of TNA modified oligonucleotides against 5′-exonuclease. FIG. 15 discloses SEQ ID NOS 672-673, 707, 672-673 and 707, respectively, in order of appearance.

[0037] FIG. 16 is a graph showing the influence of single TNA Nucleotide incorporation on in vitro siRNA Activity.

[0038] FIG. 17 is a graph showing the influence of single TNA Base Pair incorporation on in vitro siRNA Activity.

[0039] FIG. 18 are graphs showing dose response curves of an in vitro gene silencing assay.

[0040] FIG. 19 and FIG. 20, are graphs showing the effect of in vivo gene silencing in mice using TNA-Modified siRNA duplexes on serum TTR Levels.

[0041] FIG. 21 shows a structural model of TNA Bound to human Argonaute-2 protein (hAgo2).

[0042] FIG. 22 shows the structure of various 5′-(R) and (S)-methyl guanosine building blocks.

[0043] FIG. 23 shows structures of 5′-C-methyl-nucleoside within oligonucleotides.

[0044] FIG. 24A and FIG. 24B are decay curves of dT20 modified (“dT20” disclosed as SEQ ID NO: 1) at the 5′ end with Guanosine and (R) or (S)-5′-C-methyl Guanosine (C5′-MeG) with PO or PS linkages (SEQ ID NOs: 65-71, see Table 13) upon incubation with 5′ exonucleases-phosphodiesterase-II as a function of time.

[0045] FIG. 25A and FIG. 25B show the decay cures of dT20 modified (“dT20” disclosed as SEQ ID NO: 1) at the 3′ end with Guanosine and (R) or (S)-5′-C-methyl Guanosine (C5′-MeG) with PO or PS linkages (SEQ ID NOs: 72-84, see Table 14) upon incubation with snake venom phosphodiesterase as a function of time.

[0046] FIG. 26 is a plot showing the relative exonuclease stability of dT₁₈ modified (“dT₁₈” disclosed as SEQ ID NO: 2) at the 3′ end with two 5′-(R)—C-Me-2′-F—U (SEQ ID NO: 711) or 5′-(S)—C-Me-2′-F—U (SEQ ID NO: 710) nucleotides as compared to SEQ ID NO: 709.

[0047] FIG. 27 show conformations of some (S)- and (R)-MTPA esters.

[0048] FIG. 28 show conformations used for the analysis of some other (S)- and (R)-MTPA esters

[0049] FIG. 29 schematically shows DNA Pol-γ and Pol-RMT protocols.

[0050] FIG. 30 shows the incorporation assay results by Pol-RMT.

[0051] FIG. 31 shows the incorporation assay results by Pol-γ.

[0052] FIG. 32 shows mUNA monomer structures.

[0053] FIG. 33 shows TNA monomer structures.

[0054] FIG. 34 shows plots of mUNA oligo stability towards 3′-specific exonuclease (SVPD). FIG. 34 discloses SEQ ID NOS 674-676, 703-704 and 712, respectively, in order of appearance.

[0055] FIG. 35 shows plots of mUNA oligo stability towards 5′-specific exonuclease (Phosphodiesterase II). FIG. 35 discloses SEQ ID NOS 713 and 714, respectively, in order of appearance.

[0056] FIG. 36 shows a line graph of Stability of TNA-T against 5′-exonuclease (phosphodiesterase II) degradation.

[0057] FIG. 37 shows the structure of Hyp monomers.

[0058] FIG. 38 shows a plot of TTR DW1105 Free Uptake Sorted by 100 nM.

[0059] FIG. 39, FIG. 40 and FIG. 41 are line graphs showing in vivo gene silencing with Hyp-based Nucleosides. FIG. 39 discloses SEQ ID NOS 677-686, respectively, in order of appearance.

[0060] FIG. 40 discloses SEQ ID NOS 687-692, respectively, in order of appearance. FIG. 41 discloses SEQ ID NOS 693-702, respectively, in order of appearance.

[0061] FIG. 42 is a probability plot showing Incorporation of (S)-isoGNA is significantly less thermally destabilizing than (S)-GNA.

[0062] FIG. 43 are line graphs showing Incorporation of (S)-isoGNA generally improves in vivo activity over (S)-GNA.

[0063] FIG. 44 are line graphs showing incorporation of Mod 8 (2′-5′-RNA) in antisense seed region improved clinical pathology measures in rat toxicity study.

[0064] FIG. 45 depicts “Click” Linked Designs which lists some exemplary Bis-RNAi conjugates using the copper free “click” conjugation linkers Q327, Q328 and Q324. FIG. 45 discloses SEQ ID NOS 28-43, respectively, in order of appearance.

### DETAILED DESCRIPTION

[0065] Inventors have discovered inter alia that off-target effects of dsRNA molecules can be reduced or inhibited by incorporating thermally destabilizing nucleotides at certain positions in the antisense strand of the dsRNA. With these thermally destabilizing modifications at certain positions in antisense strand, the dsRNA molecules were able to retain gene silencing activity similar to the parent dsRNA while having reduced off-target gene silencing. Further, the number of off-target genes that are down-regulated or up-regulated is also reduced by dsRNA molecules comprising these thermally destabilizing modifications when compared to the parent dsRNA.

[0066] As such, in one aspect, the invention provides a double-stranded RNAi (dsRNA) agent capable of inhibiting expression of a target gene. Generally, the dsRNA molecules of the invention show high on-target gene silencing while reducing or minimizing off-target gene silencing and/or toxicity. Without limitations, the dsRNA molecules of the invention can be substituted for the dsRNA molecules and can be used for in RNA interference based gene silencing techniques, including, but not limited to, in vitro or in vivo applications.

[0067] Generally, the dsRNA molecule comprises a sense strand (also referred to as passenger strand) and an antisense strand (also referred to as guide strand). Each strand of the dsRNA molecule can range from 12-40 nucleotides in length. For example, each strand can be between 14-40 nucleotides in length, 17-37 nucleotides in length, 25-37 nucleotides in length, 27-30 nucleotides in length, 17-23 nucleotides in length, 17-21 nucleotides in length, 17-19 nucleotides in length, 19-25 nucleotides in length, 19-23 nucleotides in length, 19-21 nucleotides in length, 21-25 nucleotides in length, or 21-23 nucleotides in length. Without limitations, the sense and antisense strands can be equal length or unequal length.

[0068] In some embodiments, the antisense strand is of length 18 to 35 nucleotides. In some embodiments, the antisense strand is 21-25, 19-25, 19-21 or 21-23 nucleotides in length. In some particular embodiments, the antisense strand is 23 nucleotides in length. Similar to the antisense strand, the sense strand can be, in some embodiments, 18-35 nucleotides in length. In some embodiments, the sense strand is 21-25, 19-25, 19-21 or 21-23 nucleotides in length. In some particular embodiments, the antisense strand is 21 nucleotides in length.

[0069] The inventors also discovered that for the dsRNA molecules to be more effective in vivo, the antisense strand must have some metabolic stability. In other words, for the dsRNA molecules to be more effective in vivo, some amount of the antisense stand may need to be present in vivo after a period time after administration. Accordingly, in some embodiments, at least 40%, for example at least 45%, at least 50%, at least 55%, at least 60%, at least 65%, at least 70%, at least 75%, or at least 80% of the antisense strand of the dsRNA is present in vivo, for example in mouse liver, at day 5 after in vivo administration. In some embodiments, at least 40%, for example at least 45%, at least 50%, at least 55%, at least 60%, at least 65%, at least 70%, at least 75%, or at least 80% of the antisense strand of the dsRNA is present in vivo, for example in mouse liver, at day 6 after in vivo administration. In some embodiments, at least 40%, for example at least 45%, at least 50%, at least 55%, at least 60%, at least 65%, at least 70%, at least 75%, or at least 80% of the antisense strand of the dsRNA is present in vivo, for example in mouse liver, at day 7 after in vivo administration. In some embodiments, at least 40%, for example at least 45%, at least 50%, at least 55%, at least 60%, at least 65%, at least 70%, at least 75%, or at least 80% of the antisense strand of the dsRNA is present in vivo, for example in mouse liver, at day 8 after in vivo administration. In some embodiments, at least 40%, for example at least 45%, at least 50%, at least 55%, at least 60%, at least 65%, at least 70%, at least 75%, or at least 80% of the antisense strand of the dsRNA is present in vivo, for example in mouse liver, at day 9 after in vivo administration. In some embodiments, at least 40%, for example at least 45%, at least 50%, at least 55%, at least 60%, at least 65%, at least 70%, at least 75%, or at least 80% of the antisense strand of the dsRNA is present in vivo, for example in mouse liver, at day 10 after in vivo administration. In some embodiments, at least 40%, for example at least 45%, at least 50%, at least 55%, at least 60%, at least 65%, at least 70%, at least 75%, or at least 80% of the antisense strand of the dsRNA is present in vivo, for example in mouse liver, at day 11 after in vivo administration. In some embodiments, at least 40%, for example at least 45%, at least 50%, at least 55%, at least 60%, at least 65%, at least 70%, at least 75%, or at least 80% of the antisense strand of the dsRNA is present in vivo, for example in mouse liver, at day 12 after in vivo administration. In some embodiments, at least 40%, for example at least 45%, at least 50%, at least 55%, at least 60%, at least 65%, at least 70%, at least 75%, or at least 80% of the antisense strand of the dsRNA is present in vivo, for example in mouse liver, at day 13 after in vivo administration. In some embodiments, at least 40%, for example at least 45%, at least 50%, at least 55%, at least 60%, at least 65%, at least 70%, at least 75%, or at least 80% of the antisense strand of the dsRNA is present in vivo, for example in mouse liver, at day 14 after in vivo administration. In some embodiments, at least 40%, for example at least 45%, at least 50%, at least 55%, at least 60%, at least 65%, at least 70%, at least 75%, or at least 80% of the antisense strand of the dsRNA is present in vivo, for example in mouse liver, at day 15 after in vivo administration.

[0070] In some embodiments, the dsRNA molecule comprises a sense strand and an antisense strand, each strand having 14 to 40 nucleotides, wherein the antisense strand has sufficient complementarity to the target sequence to mediate RNA interference and wherein the antisense strand comprises at least one thermally destabilizing modification of the duplex within the seed region (i.e., at position 2-9 of the 5′-end of the antisense strand, counting from the 5′-end), the dsRNA has a melting temperature (Tₘ) of from about 40° C. to about 80° C., and the dsRNA optionally further has at least one (e.g., one, two, three, four, five, six, seven or all eight) of the following characteristics: (i) the antisense comprises 2, 3, 4, 5 or 6 2′-fluoro modifications; (ii) the antisense comprises 1, 2, 3 or 4 phosphorothioate internucleotide linkages; (iii) the sense strand is conjugated with a ligand; (iv) the sense strand comprises 2, 3, 4 or 5 2′-fluoro modifications; (v) the sense strand comprises 1, 2, 3 or 4 phosphorothioate internucleotide linkages; (vi) the dsRNA comprises at least four 2′-fluoro modifications; (vii) the dsRNA comprises a duplex region of 12-40 nucleotide pairs in length; (viii) a blunt end at 5′end of the antisense strand; and wherein the destabilizing modification is selected from mUNA and GNA building blocks described in Examples 1-3 herein. In some embodiments, the destabilizing modification is selected from the group consisting of GNA-isoC, GNA-isoG, 5′-mUNA, 4′-mUNA, 3′-mUNA, and 2′-mUNA. In some further embodiments of this, the dsRNA molecule further comprises at least one thermally destabilizing modification selected from the group consisting of GNA, 2′-OMe, 3′-OMe, 5′-Me, Hy p-spacer, SNA, hGNA, hhGNA, mGNA, TNA and h′GNA (Mod A-Mod K). In some embodiments, the Tₘ of from about 40° C. to about 80° C. is optional.

[0071] In some embodiments, the dsRNA molecule has a duplex region of 12-40 nucleotide pairs in length, wherein the antisense strand comprises at least one thermally destabilizing modification of the duplex within the seed region (i.e., at position 2-9 of the 5′-end of the antisense strand, counting from the 5′-end), and the dsRNA has a Tₘ of from about 40° C. to about 80° C., and wherein the dsRNA optionally further has at least one (e.g., one, two, three, four, five, six or all seven) of the following characteristics: (i) the antisense comprises 2, 3, 4, 5 or 6 2′-fluoro modifications; (ii) the antisense comprises 1, 2, 3 or 4 phosphorothioate internucleotide linkages; (iii) the sense strand is conjugated with a ligand; (iv) the sense strand comprises 2, 3, 4 or 5 2′-fluoro modifications; (v) the sense strand comprises 1, 2, 3 or 4 phosphorothioate internucleotide linkages; (vi) the dsRNA comprises at least four 2′-fluoro modifications; vii) a blunt end at 5′end of the antisense strand; and wherein the destabilizing modification is selected from mUNA and GNA building blocks described in Examples 1-3 herein. In some embodiments, the destabilizing modification is selected from the group consisting of GNA-isoC, GNA-isoG, 5′-mUNA, 4′-mUNA, 3′-mUNA, and 2′-mUNA. In some further embodiments of this, the dsRNA molecule further comprises at least one thermally destabilizing modification selected from the group consisting of GNA, 2′-OMe, 3′-OMe, 5′-Me, Hy p-spacer, SNA, hGNA, hhGNA, mGNA, TNA and h′GNA (Mod A-Mod K). In some embodiments, the Tₘ of from about 40° C. to about 80° C. is optional.

[0072] In some embodiments, the dsRNA molecule has a duplex region of 19, 20, 21, 22 or 23 nucleotide base pairs in length, wherein the antisense strand contains at least one thermally destabilizing modification of the duplex located in the seed region of the antisense strand (i.e., at position 2-9 of the 5′-end of the antisense strand), and wherein the dsRNA has a melting temperature of about 40° C. to about 80° C., wherein the destabilizing modification is selected from mUNA and GNA building blocks described in Examples 1-3 herein. In some embodiments, the destabilizing modification is selected from the group consisting of GNA-isoC, GNA-isoG, 5′-mUNA, 4′-mUNA, 3′-mUNA, and 2′-mUNA. In some further embodiments of this, the dsRNA molecule further comprises at least one thermally destabilizing modification selected from the group consisting of GNA, 2′-OMe, 3′-OMe, 5′-Me, Hy p-spacer, SNA, hGNA, hhGNA, mGNA, TNA and h′GNA (Mod A-Mod K). In some embodiments, the Tₘ of from about 40° C. to about 80° C. is optional.

[0073] In some embodiments, the dsRNA molecule has a duplex region of 19, 20, 21, 22 or 23 nucleotide base pairs in length, wherein the antisense strand contains at least one thermally destabilizing modification of the duplex located in the seed region of the antisense strand (i.e., at position 2-9 of the 5′-end of the antisense strand), wherein the destabilizing modification is selected from mUNA and GNA building blocks described in Examples 1-3 herein. In some embodiments, the destabilizing modification is selected from the group consisting of GNA-isoC, GNA-isoG, 5′-mUNA, 4′-mUNA, 3′-mUNA, and 2′-mUNA. In some further embodiments of this, the dsRNA molecule further comprises at least one thermally destabilizing modification selected from the group consisting of GNA, 2′-OMe, 3′-OMe, 5′-Me, Hy p-spacer, SNA, hGNA, hhGNA, mGNA, TNA and h′GNA (Mod A-Mod K), and wherein the dsRNA has a melting temperature of about 40° C. to about 80° C. (e.g., 40° C., 50° C., 60° C., 70° C. or 80° C.). In some embodiments, the Tₘ of from about 40° C. to about 80° C. is optional.

[0074] In some particular embodiments, the thermally destabilizing modification of the duplex is at position 5, 6, 7, or 8 of the antisense strand, counting from 5′-end of the antisense strand, wherein the destabilizing modification is selected from mUNA and GNA building blocks described in Examples 1-3 herein. In some embodiments, the destabilizing modification is selected from the group consisting of GNA-isoC, GNA-isoG, 5′-mUNA, 4′-mUNA, 3′-mUNA, and 2′-mUNA. In some further embodiments of this, the dsRNA molecule further comprises at least one thermally destabilizing modification selected from the group consisting of GNA, 2′-OMe, 3′-OMe, 5′-Me, Hy p-spacer, SNA, hGNA, hhGNA, mGNA, TNA and h′GNA (Mod A-Mod K).

[0075] In some particular embodiments, the thermally destabilizing modification of the duplex is at position 5 of the antisense strand, counting from 5′-end of the antisense strand, wherein the destabilizing modification is selected from mUNA and GNA building blocks described in Examples 1-3 herein. In some embodiments, the destabilizing modification is selected from the group consisting of GNA-isoC, GNA-isoG, 5′-mUNA, 4′-mUNA, 3′-mUNA, and 2′-mUNA. In some further embodiments of this, the dsRNA molecule further comprises at least one thermally destabilizing modification selected from the group consisting of GNA, 2′-OMe, 3′-OMe, 5′-Me, Hy p-spacer, SNA, hGNA, hhGNA, mGNA, TNA and h′GNA (Mod A-Mod K).

[0076] In some particular embodiments, the thermally destabilizing modification of the duplex is at position 6 of the antisense strand, counting from 5′-end of the antisense strand, wherein the destabilizing modification is selected from mUNA and GNA building blocks described in Examples 1-3 herein. In some embodiments, the destabilizing modification is selected from the group consisting of GNA-isoC, GNA-isoG, 5′-mUNA, 4′-mUNA, 3′-mUNA, and 2′-mUNA. In some further embodiments of this, the dsRNA molecule further comprises at least one thermally destabilizing modification selected from the group consisting of GNA, 2′-OMe, 3′-OMe, 5′-Me, Hy p-spacer, SNA, hGNA, hhGNA, mGNA, TNA and h′GNA (Mod A-Mod K).

[0077] In some particular embodiments, the thermally destabilizing modification of the duplex is at position 7 of the antisense strand, counting from 5′-end of the antisense strand, wherein the destabilizing modification is selected from mUNA and GNA building blocks described in Examples 1-3 herein. In some embodiments, the destabilizing modification is selected from the group consisting of GNA-isoC, GNA-isoG, 5′-mUNA, 4′-mUNA, 3′-mUNA, and 2′-mUNA. In some further embodiments of this, the dsRNA molecule further comprises at least one thermally destabilizing modification selected from the group consisting of GNA, 2′-OMe, 3′-OMe, 5′-Me, Hy p-spacer, SNA, hGNA, hhGNA, mGNA, TNA and h′GNA (Mod A-Mod K).

[0078] In some particular embodiments, the thermally destabilizing modification of the duplex is at position 8 of the antisense strand, counting from 5′-end of the antisense strand, wherein the destabilizing modification is selected from mUNA and GNA building blocks described in Examples 1-3 herein. In some embodiments, the destabilizing modification is selected from the group consisting of GNA-isoC, GNA-isoG, 5′-mUNA, 4′-mUNA, 3′-mUNA, and 2′-mUNA. In some further embodiments of this, the dsRNA molecule further comprises at least one thermally destabilizing modification selected from the group consisting of GNA, 2′-OMe, 3′-OMe, 5′-Me, Hy p-spacer, SNA, hGNA, hhGNA, mGNA, TNA and h′GNA (Mod A-Mod K).

[0079] In some embodiments, the dsRNA molecule comprises a sense strand and an antisense strand, each strand having 14 to 40 nucleotides, wherein the antisense strand has sufficient complementarity to the target sequence to mediate RNA interference and wherein the antisense strand comprises at least one thermally destabilizing modification of the duplex within the seed region (i.e., at position 2-9 of the 5′-end of the antisense strand, counting from the 5′-end), wherein the dsRNA has a melting temperature of about 40° C. to about 80° C., and the antisense strand further comprises one or both of the following characteristics:
[0080] (i) 2, 3, 4, 5 or 6 2′-fluoro modifications; and
[0081] (ii) 1, 2, 3 or 4 phosphorothioate internucleotide linkages; and
   the sense strand comprises one, two or three of the following characteristics:
[0082] (i) a ligand conjugated with the sense strand;
[0083] (ii) 2, 3, 4 or 5 2′-fluoro modifications; and
[0084] (iii) 1, 2, 3 or 4 phosphorothioate internucleotide linkages;
   wherein the destabilizing modification is selected from mUNA and GNA building blocks described in Examples 1-3 herein. In some embodiments, the destabilizing modification is selected from the group consisting of GNA-isoC, GNA-isoG, 5′-mUNA, 4′-mUNA, 3′-mUNA, and 2′-mUNA. In some further embodiments of this, the dsRNA molecule further comprises at least one thermally destabilizing modification selected from the group consisting of GNA, 2′-OMe, 3′-OMe, 5′-Me, Hy p-spacer, SNA, hGNA, hhGNA, mGNA, TNA and h′GNA (Mod A-Mod K). In some embodiments of this, the Tₘ of from about 40° C. to about 80° C. is optional.

[0085] In some embodiments, the dsRNA molecule comprises a sense strand and an antisense strand, each strand having 14 to 40 nucleotides, wherein the antisense strand has sufficient complementarity to the target sequence to mediate RNA interference and wherein the antisense strand comprises at least one thermally destabilizing modification of the duplex within the first 9 nucleotide positions counting from the 5′-end, and a ligand is conjugated with the sense strand, wherein the dsRNA has a melting temperature of about 40° C. to about 80° C., and wherein the destabilizing modification is selected from mUNA and GNA building blocks described in Examples 1-3 herein. In some embodiments, the destabilizing modification is selected from the group consisting of GNA-isoC, GNA-isoG, 5′-mUNA, 4′-mUNA, 3′-mUNA, and 2′-mUNA. In some further embodiments of this, the dsRNA molecule further comprises at least one thermally destabilizing modification selected from the group consisting of GNA, 2′-OMe, 3′-OMe, 5′-Me, Hy p-spacer, SNA, hGNA, hhGNA, mGNA, TNA and h′GNA (Mod A-Mod K).

[0086] In some embodiments, the dsRNA molecule comprises a sense strand and an antisense strand, each strand having 14 to 40 nucleotides, wherein the antisense strand has sufficient complementarity to the target sequence to mediate RNA interference and wherein the antisense strand comprises at least one thermally destabilizing modification of the duplex within the first 9 nucleotide positions counting from the 5′-end, a ligand is conjugated with the sense strand, the dsRNA comprises at least four 2′-fluoro modifications, and wherein the destabilizing modification is selected from mUNA and GNA building blocks described in Examples 1-3 herein. In some embodiments, the destabilizing modification is selected from the group consisting of GNA-isoC, GNA-isoG, 5′-mUNA, 4′-mUNA, 3′-mUNA, and 2′-mUNA. In some further embodiments of this, the dsRNA molecule further comprises at least one thermally destabilizing modification selected from the group consisting of GNA, 2′-OMe, 3′-OMe, 5′-Me, Hy p-spacer, SNA, hGNA, hhGNA, mGNA, TNA and h′GNA (Mod A-Mod K). In some embodiments, the Tₘ of from about 40° C. to about 80° C. is optional.

[0087] In some embodiments, the dsRNA molecule comprises a sense strand and an antisense strand, each strand having 14 to 40 nucleotides, wherein the antisense strand has sufficient complementarity to the target sequence to mediate RNA interference, wherein the dsRNA comprises at least four 2′-fluoro, wherein said antisense strand comprises at least one thermally destabilizing modification of the duplex within the first 9 nucleotide positions, counting from the 5′-end, said sense strand comprises a ligand, wherein the dsRNA has a melting temperature of about 40° C. to about 80° C., and wherein the destabilizing modification is selected from mUNA and GNA building blocks described in Examples 1-3 herein. In some embodiments, the destabilizing modification is selected from the group consisting of GNA-isoC, GNA-isoG, 5′-mUNA, 4′-mUNA, 3′-mUNA, and 2′-mUNA. In some further embodiments of this, the dsRNA molecule further comprises at least one thermally destabilizing modification selected from the group consisting of GNA, 2′-OMe, 3′-OMe, 5′-Me, Hy p-spacer, SNA, hGNA, hhGNA, mGNA, TNA and h′GNA (Mod A-Mod K). In some further embodiments of this, the ligand is an ASGPR ligand. In some embodiments, the Tₘ of from about 40° C. to about 80° C. is optional.

[0088] In some embodiments, the dsRNA molecule comprises a sense strand and an antisense strand, each strand having 14 to 40 nucleotides, wherein the antisense strand has sufficient complementarity to the target sequence to mediate RNA interference, wherein said antisense strand comprises at least one thermally destabilizing modification of the duplex located in position 4-8, counting from the 5′-end, wherein said sense strand comprises a ligand, wherein each of the sense and antisense strands comprise at least two 2′-fluoro modifications, wherein the dsRNA has a melting temperature of about 40° C. to about 80° C., and wherein the destabilizing modification is selected from mUNA and GNA building blocks described in Examples 1-3 herein. In some embodiments, the destabilizing modification is selected from the group consisting of GNA-isoC, GNA-isoG, 5′-mUNA, 4′-mUNA, 3′-mUNA, and 2′-mUNA. In some further embodiments of this, the dsRNA molecule further comprises at least one thermally destabilizing modification selected from the group consisting of GNA, 2′-OMe, 3′-OMe, 5′-Me, Hy p-spacer, SNA, hGNA, hhGNA, mGNA, TNA and h′GNA (Mod A-Mod K). In some further embodiments of this, the ligand is an ASGPR ligand. In some embodiments, the Tₘ of from about 40° C. to about 80° C. is optional.

[0089] In some embodiments, the dsRNA molecule comprises a sense strand and an antisense strand, each strand having 14 to 40 nucleotides, wherein the antisense strand has sufficient complementarity to the target sequence to mediate RNA interference, wherein the dsRNA comprises at least four 2′-fluoro, wherein said antisense strand comprises at least one thermally destabilizing modification of the duplex within the first 9 nucleotide positions, counting from the 5′-end, and wherein said sense strand comprises a ligand, wherein the dsRNA has a melting temperature of about 40° C. to about 80° C., and wherein the antisense further comprises at least two of the following characteristics: (i) the thermally destabilizing modification of the duplex is located in position 4 to 8 of the antisense strand; (ii) at least two 2′-fluoro modifications; (iii) phosphorothioate internucleotide linkages between nucleotide positions 1 and 2 (counting from the 5′ end); antisense strand has a length of 18 to 35 nucleotides, and wherein the destabilizing modification is selected from mUNA and GNA building blocks described in Examples 1-3 herein. In some embodiments, the destabilizing modification is selected from the group consisting of GNA-isoC, GNA-isoG, 5′-mUNA, 4′-mUNA, 3′-mUNA, and 2′-mUNA. In some further embodiments of this, the dsRNA molecule further comprises at least one thermally destabilizing modification selected from the group consisting of GNA, 2′-OMe, 3′-OMe, 5′-Me, Hy p-spacer, SNA, hGNA, hhGNA, mGNA, TNA and h′GNA (Mod A-Mod K). In some further embodiments the ligand is an ASGPR ligand. In some embodiments, the Tₘ of from about 40° C. to about 80° C. is optional.

[0090] In some embodiments, the dsRNA molecule comprises a sense strand and an antisense strand, each strand having 14 to 40 nucleotides, wherein the antisense strand has sufficient complementarity to the target sequence to mediate RNA interference, wherein the dsRNA comprises at least four 2′-fluoro, wherein said antisense strand comprises at least one thermally destabilizing modification of the duplex within the first 9 nucleotide positions, counting from the 5′-end, and wherein said sense strand comprises a ligand, wherein the dsRNA has a melting temperature of about 40° C. to about 80° C., and the sense strand has at least one of the following characteristics: (i) the ligand is attached to either end of the sense strand; (ii) sense strand comprises at least two 2′-fluoro modifications; and (iii) the sense strand and the antisense strand show sufficient complementarity to form a double stranded region spanning at least 19 nucleotide positions, wherein the thermally destabilizing modification of the duplex is located within said double-stranded region, and wherein the destabilizing modification is selected from mUNA and GNA building blocks described in Examples 1-3 herein. In some embodiments, the destabilizing modification is selected from the group consisting of GNA-isoC, GNA-isoG, 5′-mUNA, 4′-mUNA, 3′-mUNA, and 2′-mUNA. In some further embodiments of this, the dsRNA molecule further comprises at least one thermally destabilizing modification selected from the group consisting of GNA, 2′-OMe, 3′-OMe, 5′-Me, Hy p-spacer, SNA, hGNA, hhGNA, mGNA, TNA and h′GNA (Mod A-Mod K). In some embodiments, the Tₘ of from about 40° C. to about 80° C. is optional.

[0091] In some embodiments, the dsRNA molecule comprises a sense strand and an antisense strand, each strand having 14 to 40 nucleotides, wherein the antisense strand has sufficient complementarity to the target sequence to mediate RNA interference, wherein the dsRNA comprises at least four 2′-fluoro, wherein said antisense strand comprises at least one thermally destabilizing modification of the duplex within the first 9 nucleotide positions, counting from the 5′-end, and wherein said sense strand comprises a ligand, wherein the dsRNA has a melting temperature of about 40° C. to about 80° C., and wherein the thermally destabilizing modification of the duplex is selected from the group consisting of GNA-isoC, GNA-isoG, 5′m-UNA, 3′-mUNA and 2′-mUNA. In some further embodiments of this, the dsRNA molecule further comprises at least one thermally destabilizing modification selected from the group consisting of GNA, 2′-OMe, 3′-OMe, 5′-Me, Hy p-spacer, SNA, hGNA, hhGNA, mGNA, TNA and h′GNA (Mod A-Mod K). In some embodiments, the Tₘ of from about 40° C. to about 80° C. is optional.

[0092] In some embodiments, the dsRNA molecule comprises a sense strand and an antisense strand, each strand having 14 to 40 nucleotides, wherein the antisense strand has sufficient complementarity to the target sequence to mediate RNA interference, wherein said antisense strand comprises at least one thermally destabilizing modification of the duplex located in position 4-8, counting from the 5′-end, wherein said sense strand comprises a ligand, and wherein each of the sense and antisense strands comprise at least two 2′-fluoro modifications, wherein the dsRNA has a melting temperature of about 40° C. to about 80° C., and wherein the destabilizing modification is selected from mUNA and GNA building blocks described in Examples 1-3 herein. In some embodiments, the destabilizing modification is selected from the group consisting of GNA-isoC, GNA-isoG, 5′-mUNA, 4′-mUNA, 3′-mUNA, and 2′-mUNA. In some further embodiments of this, the dsRNA molecule further comprises at least one thermally destabilizing modification selected from the group consisting of GNA, 2′-OMe, 3′-OMe, 5′-Me, Hy p-spacer, SNA, hGNA, hhGNA, mGNA, TNA and h′GNA (Mod A-Mod K). In some embodiments, the Tₘ of from about 40° C. to about 80° C. is optional.

[0093] In some embodiments, the dsRNA molecule comprises a sense strand and an antisense strand, each strand having 14 to 40 nucleotides, wherein the antisense strand has sufficient complementarity to the target sequence to mediate RNA interference, wherein the dsRNA comprises at least four 2′-fluoro, wherein said antisense strand comprises at least one thermally destabilizing modification of the duplex located at position 7, counting from the 5′-end of the antisense strand, wherein said sense strand comprises a ligand, wherein the dsRNA has a melting temperature of about 40° C. to about 80° C. and wherein the destabilizing modification is selected from mUNA and GNA building blocks described in Examples 1-3 herein. In some embodiments, the destabilizing modification is selected from the group consisting of GNA-isoC, GNA-isoG, 5′-mUNA, 4′-mUNA, 3′-mUNA, and 2′-mUNA. In some further embodiments of this, the dsRNA molecule further comprises at least one thermally destabilizing modification selected from the group consisting of GNA, 2′-OMe, 3′-OMe, 5′-Me, Hy p-spacer, SNA, hGNA, hhGNA, mGNA, TNA and h′GNA (Mod A-Mod K). In some embodiments, the Tₘ of from about 40° C. to about 80° C. is optional.

[0094] In some embodiments, the dsRNA molecule comprises a sense strand and an antisense strand, each strand having 14 to 40 nucleotides, wherein the antisense strand has sufficient complementarity to the target sequence to mediate RNA interference, wherein said antisense strand comprises at least one thermally destabilizing modification of the duplex located at position 7, counting from the 5′-end, wherein said sense strand comprises a ligand, and wherein each of the sense and antisense strands comprise at least two 2′-fluoro modifications, wherein the dsRNA has a melting temperature of about 40° C. to about 80° C., and wherein the destabilizing modification is selected from mUNA and GNA building blocks described in Examples 1-3 herein. In some embodiments, the destabilizing modification is selected from the group consisting of GNA-isoC, GNA-isoG, 5′-mUNA, 4′-mUNA, 3′-mUNA, and 2′-mUNA. In some further embodiments of this, the dsRNA molecule further comprises at least one thermally destabilizing modification selected from the group consisting of GNA, 2′-OMe, 3′-OMe, 5′-Me, Hy p-spacer, SNA, hGNA, hhGNA, mGNA, TNA and h′GNA (Mod A-Mod K). In some embodiments, the Tₘ of from about 40° C. to about 80° C. is optional.

[0095] In some embodiments, the dsRNA molecule comprises a sense strand and an antisense strand, each strand having 14 to 40 nucleotides, wherein the antisense strand has sufficient complementarity to the target sequence to mediate RNA interference, wherein the dsRNA comprises at least four 2′-fluoro, wherein said antisense strand comprises at least one thermally destabilizing modification of the duplex within the first 9 nucleotide positions, counting from the 5′-end, wherein said sense strand comprises a ligand, wherein the dsRNA has a melting temperature of about 40° C. to about 80° C., wherein the ligand comprises one or more GalNAc derivatives attached through a bivalent or trivalent branched linker, and wherein the destabilizing modification is selected from mUNA and GNA building blocks described in Examples 1-3 herein. In some embodiments, the destabilizing modification is selected from the group consisting of GNA-isoC, GNA-isoG, 5′-mUNA, 4′-mUNA, 3′-mUNA, and 2′-mUNA. In some further embodiments of this, the dsRNA molecule further comprises at least one thermally destabilizing modification selected from the group consisting of GNA, 2′-OMe, 3′-OMe, 5′-Me, Hy p-spacer, SNA, hGNA, hhGNA, mGNA, TNA and h′GNA (Mod A-Mod K). In some embodiments, the Tₘ of from about 40° C. to about 80° C. is optional.

[0096] In some embodiments, the dsRNA molecule comprises a sense strand and an antisense strand, each strand having 14 to 40 nucleotides, wherein the antisense strand has sufficient complementarity to the target sequence to mediate RNA interference, wherein the dsRNA comprises at least four 2′-fluoro, wherein said antisense strand comprises at least one thermally destabilizing modification of the duplex within the first 9 nucleotide positions, counting from the 5′-end, and wherein said sense strand comprises a ligand, wherein the dsRNA optionally has a melting temperature of about 40° C. to about 80° C., and wherein the ligand is an ASGPR ligand of structure:

[chemical structure]

wherein the destabilizing modification is selected from mUNA and GNA building blocks described in Examples 1-3 herein. In some embodiments, the destabilizing modification is selected from the group consisting of GNA-isoC, GNA-isoG, 5′-mUNA, 4′-mUNA, 3′-mUNA, and 2′-mUNA. In some further embodiments of this, the dsRNA molecule further comprises at least one thermally destabilizing modification selected from the group consisting of GNA, 2′-OMe, 3′-OMe, 5′-Me, Hy p-spacer, SNA, hGNA, hhGNA, mGNA, TNA and h′GNA (Mod A-Mod K). In some embodiments, the Tₘ of from about 40° C. to about 80° C. is optional.

[0097] In some embodiments, the sense and antisense strands are independently 19, 20, 21, 22, 23, 24 or 25 nucleotides in length; the antisense strand contains at least one thermally destabilizing nucleotide, where the at least one thermally destabilizing nucleotide is in the seed region of the antisense strand (i.e., at position 2-9 of the 5′-end of the antisense strand); wherein the sense strand is conjugated with a ligand, comprises 3 or 4 2′-fluoro modifications, and comprises 0, 1, 2 or 3phosphorothioate internucleotide linkages; wherein the antisense strand comprises 3, 4, 5 or 6 2′-fluoro modifications, and comprises 2, 3, 4 or 5 phosphorothioate internucleotide linkages; wherein the dsRNA has a melting temperature of about 40° C. to about 80° C.; and wherein the dsRNA optionally further has at least one (e.g., one, two or all three) of the following characteristics: (i) the dsRNA comprises a duplex region of 12-25 nucleotide pairs in length; (ii) the dsRNA comprises a blunt end at 5′-end of the antisense strand; and (iii) the dsRNA has at least a two nucleotide overhang at the 3′-end of the antisense strand, and wherein the destabilizing modification is selected from mUNA and GNA building blocks described in Examples 1-3 herein. In some embodiments, the destabilizing modification is selected from the group consisting of GNA-isoC, GNA-isoG, 5′-mUNA, 4′-mUNA, 3′-mUNA, and 2′-mUNA. In some further embodiments of this, the dsRNA molecule further comprises at least one thermally destabilizing modification selected from the group consisting of GNA, 2′-OMe, 3′-OMe, 5′-Me, Hy p-spacer, SNA, hGNA, hhGNA, mGNA, TNA and h′GNA (Mod A-Mod K). In some embodiments, the Tₘ of from about 40° C. to about 80° C. is optional.

[0098] In some embodiments, the sense and antisense strands are independently 19, 20, 21, 22, 23, 24 or 25 nucleotides in length; the antisense strand contains at least one thermally destabilizing nucleotide, where the at least one thermally destabilizing nucleotide is in the seed region of the antisense strand (i.e., at position 2-9 of the 5′-end of the antisense strand); wherein the sense strand is conjugated with a ligand, comprises 2′-fluoro modifications at positions 7, 10 and 11 or at positions 7, 9, 10 and 11 (counting from 5′-end of the sense strand), and optionally comprises phosphorothioate internucleotide linkages between nucleotide positions 1 and 2, and between nucleotide positions 2 and 3; wherein the antisense strand comprises 3, 4, 5 or 6 2′-fluoro modifications, comprises 2, 3, 4 or 5 phosphorothioate internucleotide linkages; wherein the dsRNA has a melting temperature of about 40° C. to about 80° C.; and wherein the dsRNA optionally further has at least one (e.g., one, two or all three) of the following characteristics: (i) the dsRNA comprises a duplex region of 12-25 nucleotide pairs in length; (ii) the dsRNA comprises a blunt end at 5′-end of the antisense strand; and (iii) the dsRNA has at least a two nucleotide overhang at the 3′-end of the antisense strand, and wherein the destabilizing modification is selected from mUNA and GNA building blocks described in Examples 1-3 herein. In some embodiments, the destabilizing modification is selected from the group consisting of GNA-isoC, GNA-isoG, 5′-mUNA, 4′-mUNA, 3′-mUNA, and 2′-mUNA. In some further embodiments of this, the dsRNA molecule further comprises at least one thermally destabilizing modification selected from the group consisting of GNA, 2′-OMe, 3′-OMe, 5′-Me, Hy p-spacer, SNA, hGNA, hhGNA, mGNA, TNA and h′GNA (Mod A-Mod K). In some embodiments, the Tₘ of from about 40° C. to about 80° C. is optional.

[0099] In some embodiments, the sense and antisense strands are independently 19, 20, 21, 22, 23, 24 or 25 nucleotides in length; the antisense strand contains at least one thermally destabilizing nucleotide, where the at least one thermally destabilizing nucleotide is in the seed region of the antisense strand (i.e., at position 2-9 of the 5′-end of the antisense strand); wherein the sense strand is conjugated with a ligand, comprises 3 or 4 2′-fluoro modifications, and comprises 0, 1, 2 or 3 phosphorothioate internucleotide linkages; wherein the antisense strand comprises 2′-fluoro modifications at positions 2, 6, 8, 9, 14 or 16, or at positions 2, 6, 14 or 16, or at positions 2, 14 and 16; and the antisense comprises phosphorothioate internucleotide linkages between nucleotide positions 21 and 22, and between nucleotide positions 22 and 23; wherein the dsRNA has a melting temperature of about 40° C. to about 80° C.; and wherein the dsRNA optionally further has at least one (e.g., one, two or all three) of the following characteristics: (i) the dsRNA comprises a duplex region of 12-25 nucleotide pairs in length; (ii) the dsRNA comprises a blunt end at 5′-end of the antisense strand; and (iii) the dsRNA has at least a two nucleotide overhang at the 3′-end of the antisense strand, and wherein the destabilizing modification is selected from mUNA and GNA building blocks described in Examples 1-3 herein. In some embodiments, the destabilizing modification is selected from the group consisting of GNA-isoC, GNA-isoG, 5′-mUNA, 4′-mUNA, 3′-mUNA, and 2′-mUNA. In some further embodiments of this, the dsRNA molecule further comprises at least one thermally destabilizing modification selected from the group consisting of GNA, 2′-OMe, 3′-OMe, 5′-Me, Hy p-spacer, SNA, hGNA, hhGNA, mGNA, TNA and h′GNA (Mod A-Mod K). In some embodiments, the Tₘ of from about 40° C. to about 80° C. is optional.

[0100] In some embodiments, the sense and antisense strands are independently 19, 20, 21, 22, 23, 24 or 25 nucleotides in length; the antisense strand contains at least one thermally destabilizing nucleotide, where the at least one thermally destabilizing nucleotide is in the seed region of the antisense strand (i.e., at position 2-9 of the 5′-end of the antisense strand); wherein the sense strand is conjugated with a ligand, comprises 3 or 4 2′-fluoro modifications, and comprises 0, 1, 2 or 3 phosphorothioate internucleotide linkages; wherein the antisense strand comprises 2′-fluoro modifications at positions 2, 6, 8, 9, 14 or 16, or at positions 2, 6, 14 or 16, or at positions 2, 14 and 16; and the antisense comprises phosphorothioate internucleotide linkages between nucleotide positions 21 and 22, between nucleotide positions 22 and 23, between nucleotide positions 1 and 2, between nucleotide positions 2 and 3; wherein the dsRNA has a melting temperature of about 40° C. to about 80° C.; and wherein the dsRNA optionally further has at least one (e.g., one, two or all three) of the following characteristics: (i) the dsRNA comprises a duplex region of 12-25 nucleotide pairs in length; (ii) the dsRNA comprises a blunt end at 5′-end of the antisense strand; and (iii) the dsRNA has at least a two nucleotide overhang at the 3′-end of the antisense strand, and wherein the destabilizing modification is selected from mUNA and GNA building blocks described in Examples 1-3 herein. In some embodiments, the destabilizing modification is selected from the group consisting of GNA-isoC, GNA-isoG, 5′-mUNA, 4′-mUNA, 3′-mUNA, and 2′-mUNA. In some further embodiments of this, the dsRNA molecule further comprises at least one thermally destabilizing modification selected from the group consisting of GNA, 2′-OMe, 3′-OMe, 5′-Me, Hy p-spacer, SNA, hGNA, hhGNA, mGNA, TNA and h′GNA (Mod A-Mod K). In some embodiments, the Tₘ of from about 40° C. to about 80° C. is optional.

[0101] In some embodiments, the sense and antisense strands are independently 19, 20, 21, 22, 23, 24 or 25 nucleotides in length; the antisense strand contains at least one thermally destabilizing nucleotide, where the at least one thermally destabilizing nucleotide is in the seed region of the antisense strand (i.e., at position 2-9 of the 5′-end of the antisense strand); wherein the sense strand is conjugated with a ligand, comprises 2′-fluoro modifications at positions 7, 10 and 11 or at positions 7, 9, 10 and 11 (counting from 5′-end of the sense strand), and optionally comprises phosphorothioate internucleotide linkages between nucleotide positions 1 and 2, and between nucleotide positions 2 and 3; wherein the antisense strand comprises 2′-fluoro modifications at positions 2, 6, 8, 9, 14 or 16, or at positions 2, 6, 14 or 16, or at positions 2, 14 and 16; and the antisense comprises phosphorothioate internucleotide linkages between nucleotide positions 21 and 22, and between nucleotide positions 22 and 23; wherein the dsRNA has a melting temperature of about 40° C. to about 80° C.; and wherein the dsRNA optionally further has at least one (e.g., one, two or all three) of the following characteristics: (i) the dsRNA comprises a duplex region of 12-25 nucleotide pairs in length; (ii) the dsRNA comprises a blunt end at 5′-end of the antisense strand; and (iii) the dsRNA has at least a two nucleotide overhang at the 3′-end of the antisense strand, and wherein the destabilizing modification is selected from mUNA and GNA building blocks described in Examples 1-3 herein. In some embodiments, the destabilizing modification is selected from the group consisting of GNA-isoC, GNA-isoG, 5′-mUNA, 4′-mUNA, 3′-mUNA, and 2′-mUNA. In some further embodiments of this, the dsRNA molecule further comprises at least one thermally destabilizing modification selected from the group consisting of GNA, 2′-OMe, 3′-OMe, 5′-Me, Hy p-spacer, SNA, hGNA, hhGNA, mGNA, TNA and h′GNA (Mod A-Mod K). In some embodiments, the Tₘ of from about 40° C. to about 80° C. is optional.

[0102] In some embodiments, the sense and antisense strands are independently 19, 20, 21, 22, 23, 24 or 25 nucleotides in length, wherein the antisense strand contains at least one thermally destabilizing nucleotide, and where the at least one thermally destabilizing nucleotide is in the seed region of the antisense strand (i.e., at position 2-9 of the 5′-end of the antisense strand), wherein the dsRNA has a melting temperature of about 40° C. to about 80° C., and wherein the dsRNA optionally further has at least one (e.g., one, two, three, four, five, six, seven or all eight) of the following characteristics: (i) the antisense comprises 2, 3, 4, 5 or 6 2′-fluoro modifications; (ii) the antisense comprises 1, 2, 3. 4 or 5 phosphorothioate internucleotide linkages; (iii) the sense strand is conjugated with a ligand; (iv) the sense strand comprises 2, 3, 4 or 5 2′-fluoro modifications; (v) the sense strand comprises 1, 2, 3, 4 or 5 phosphorothioate internucleotide linkages; (vi) the dsRNA comprises at least four 2′-fluoro modifications; (vii) the dsRNA comprises a duplex region of 18, 19, 20, 21, 22, 23, 24 or 24 nucleotide pairs in length; and (viii) the dsRNA comprises a blunt end at 5′-end of the sense strand, and wherein the destabilizing modification is selected from mUNA and GNA building blocks described in Examples 1-3 herein. In some embodiments, the destabilizing modification is selected from the group consisting of GNA-isoC, GNA-isoG, 5′-mUNA, 4′-mUNA, 3′-mUNA, and 2′-mUNA. In some further embodiments of this, the dsRNA molecule further comprises at least one thermally destabilizing modification selected from the group consisting of GNA, 2′-OMe, 3′-OMe, 5′-Me, Hy p-spacer, SNA, hGNA, hhGNA, mGNA, TNA and h′GNA (Mod A-Mod K). In some particular embodiments, sense strand is 19, 20 or 21 or 22 nucleotides in length and the antisense strand is 20, 21 or 22 nucleotides in length. In some embodiments, the Tₘ of from about 40° C. to about 80° C. is optional.

[0103] In some embodiments, the sense and antisense strands are independently 19, 20, 21, 22, 23, 24 or 25 nucleotides in length; the antisense strand contains at least one thermally destabilizing nucleotide, where the at least one thermally destabilizing nucleotide is in the seed region of the antisense strand (i.e., at position 2-9 of the 5′-end of the antisense strand); wherein the sense strand is conjugated with a ligand, comprises 2′-fluoro modifications at positions 7, 10 and 11 or at positions 7, 9, 10 and 11 (counting from 5′-end of the sense strand), and optionally comprises phosphorothioate internucleotide linkages between nucleotide positions 1 and 2, and between nucleotide positions 2 and 3; wherein the antisense strand comprises 2′-fluoro modifications at positions 2, 6, 8, 9, 14 or 16, or at positions 2, 6, 14 or 16, or at positions 2, 14 and 16; and the antisense comprises phosphorothioate internucleotide linkages between nucleotide positions 21 and 22, between nucleotide positions 22 and 23, between nucleotide positions 1 and 2, between nucleotide positions 2 and 3; wherein the dsRNA has a melting temperature of about 40° C. to about 80° C.; and wherein the dsRNA optionally further has at least one (e.g., one, two or all three) of the following characteristics: (i) the dsRNA comprises a duplex region of 12-25 nucleotide pairs in length; (ii) the dsRNA comprises a blunt end at 5′-end of the antisense strand; and (iii) the dsRNA has at least a two nucleotide overhang at the 3′-end of the antisense strand, and wherein the destabilizing modification is selected from mUNA and GNA building blocks described in Examples 1-3 herein. In some embodiments, the destabilizing modification is selected from the group consisting of GNA-isoC, GNA-isoG, 5′-mUNA, 4′-mUNA, 3′-mUNA, and 2′-mUNA. In some further embodiments of this, the dsRNA molecule further comprises at least one thermally destabilizing modification selected from the group consisting of GNA, 2′-OMe, 3′-OMe, 5′-Me, Hy p-spacer, SNA, hGNA, hhGNA, mGNA, TNA and h′GNA (Mod A-Mod K). In some embodiments, the Tₘ of from about 40° C. to about 80° C. is optional.

[0104] In some embodiments, one end of the dsRNA is a blunt end and the other end has an overhang, wherein the antisense strand contains at least one thermally destabilizing nucleotide, and where the at least one thermally destabilizing nucleotide is in the seed region of the antisense strand (i.e., at position 2-9 of the 5′-end of the antisense strand), wherein the dsRNA has a melting temperature of about 40° C. to about 80° C., and wherein the dsRNA optionally further has at least one (e.g., one, two, three, four, five, six or all seven) of the following characteristics: (i) the antisense comprises 2, 3, 4, 5 or 6 2′-fluoro modifications; (ii) the antisense comprises 1, 2, 3, 4 or 5 phosphorothioate internucleotide linkages; (iii) the sense strand is conjugated with a ligand; (iv) the sense strand comprises 2, 3, 4 or 5 2′-fluoro modifications; (v) the sense strand comprises 1, 2, 3, 4 or 5 phosphorothioate internucleotide linkages; (vi) the dsRNA comprises at least four 2′-fluoro modifications; (vii) and the dsRNA comprises a duplex region of 12-40 nucleotide pairs in length, and wherein the destabilizing modification is selected from mUNA and GNA building blocks described in Examples 1-3 herein. In some embodiments, the destabilizing modification is selected from the group consisting of GNA-isoC, GNA-isoG, 5′-mUNA, 4′-mUNA, 3′-mUNA, and 2′-mUNA. In some further embodiments of this, the dsRNA molecule further comprises at least one thermally destabilizing modification selected from the group consisting of GNA, 2′-OMe, 3′-OMe, 5′-Me, Hy p-spacer, SNA, hGNA, hhGNA, mGNA, TNA and h′GNA (Mod A-Mod K). In some embodiments, the overhang is on the 3′-end of the antisense strand and the blunt end is at the 5′-end of the antisense strand. In some particular embodiments, the overhang is 2, 3 or 4-nucleotides in length. In some embodiments, the Tₘ of from about 40° C. to about 80° C. is optional.

[0105] In some embodiments, the dsRNA molecule has a duplex region of 19, 20, 21, 22 or 23 nucleotide base pairs in length, wherein one end of the dsRNA is a blunt end and the other end has an overhang, wherein the antisense strand contains at least one thermally destabilizing modification of the duplex located in the seed region of the antisense strand (i.e., at position 2-9 of the 5′-end of the antisense strand), wherein the dsRNA has a melting temperature of about 40° C. to about 80° C., and wherein the dsRNA optionally further has at least one (e.g., one, two, three, five or all six) of the following characteristics: (i) the antisense comprises 2, 3, 4, 5 or 6 2′-fluoro modifications; (ii) the antisense comprises 1, 2, 3, 4 or 5 phosphorothioate internucleotide linkages; (iii) the sense strand is conjugated with a ligand; (iv) the sense strand comprises 2, 3, 4 or 5 2′-fluoro modifications; (v) the sense strand comprises 1, 2, 3, 4 or 5 phosphorothioate internucleotide linkages; and (vi) the dsRNA comprises at least four 2′-fluoro modifications, and optionally the 2 nucleotide overhang is on the 3′-end of the antisense strand and the blunt end is at the 5′-end of the antisense strand, and wherein the destabilizing modification is selected from mUNA and GNA building blocks described in Examples 1-3 herein. In some embodiments, the destabilizing modification is selected from the group consisting of GNA-isoC, GNA-isoG, 5′-mUNA, 4′-mUNA, 3′-mUNA, and 2′-mUNA. In some further embodiments of this, the dsRNA molecule further comprises at least one thermally destabilizing modification selected from the group consisting of GNA, 2′-OMe, 3′-OMe, 5′-Me, Hy p-spacer, SNA, hGNA, hhGNA, mGNA, TNA and h′GNA (Mod A-Mod K). In some embodiments, the overhang is on the 3′-end of the antisense strand and the blunt end is at the 5′-end of the antisense strand. In some embodiments, the Tₘ of from about 40° C. to about 80° C. is optional.

[0106] In some embodiments, the dsRNA molecule of the invention may also have two blunt ends, at both ends of the dsRNA duplex.

[0107] In some embodiments, the dsRNA has a blunt end at both ends of the duplex, wherein the antisense strand contains at least one thermally destabilizing nucleotide, and where the at least one thermally destabilizing nucleotide is in the seed region of the antisense strand (i.e., at position 2-9 of the 5′-end of the antisense strand), wherein the dsRNA has a melting temperature of about 40° C. to about 80° C., and wherein the dsRNA optionally further has at least one (e.g., one, two, three, four, five, six or all seven) of the following characteristics: (i) the antisense comprises 2, 3, 4, 5 or 6 2′-fluoro modifications; (ii) the antisense comprises 1, 2, 3, 4 or 5 phosphorothioate internucleotide linkages; (iii) the sense strand is conjugated with a ligand; (iv) the sense strand comprises 2, 3, 4 or 5 2′-fluoro modifications; (v) the sense strand comprises 1, 2, 3, 4 or 5 phosphorothioate internucleotide linkages; (vi) the dsRNA comprises at least four 2′-fluoro modifications; and (vii) the dsRNA comprises a duplex region of 12-40 nucleotide pairs in length, and wherein the destabilizing modification is selected from mUNA and GNA building blocks described in Examples 1-3 herein. In some embodiments, the destabilizing modification is selected from the group consisting of GNA-isoC, GNA-isoG, 5′-mUNA, 4′-mUNA, 3′-mUNA, and 2′-mUNA. In some further embodiments of this, the dsRNA molecule further comprises at least one thermally destabilizing modification selected from the group consisting of GNA, 2′-OMe, 3′-OMe, 5′-Me, Hy p-spacer, SNA, hGNA, hhGNA, mGNA, TNA and h′GNA (Mod A-Mod K). In some embodiments, the Tₘ of from about 40° C. to about 80° C. is optional.

[0108] In some embodiments, the dsRNA molecule has a duplex region of 19, 20, 21, 22 or 23 nucleotide base pairs in length and has a blunt end at both ends of the duplex, wherein one end of the dsRNA is a blunt end and the other end has an overhang, wherein the antisense strand contains at least one thermally destabilizing modification of the duplex located in the seed region of the antisense strand (i.e., at position 2-9 of the 5′-end of the antisense strand), wherein the dsRNA has a melting temperature of about 40° C. to about 80° C., and wherein the dsRNA optionally further has at least one (e.g., one, two, three, five or all six) of the following characteristics: (i) the antisense comprises 2, 3, 4, 5 or 6 2′-fluoro modifications; (ii) the antisense comprises 1, 2, 3, 4 or 5 phosphorothioate internucleotide linkages; (iii) the sense strand is conjugated with a ligand; (iv) the sense strand comprises 2, 3, 4 or 5 2′-fluoro modifications; (v) the sense strand comprises 1, 2, 3, 4 or 5 phosphorothioate internucleotide linkages; and (vi) the dsRNA comprises at least four 2′-fluoro modifications, and wherein the destabilizing modification is selected from mUNA and GNA building blocks described in Examples 1-3 herein. In some embodiments, the destabilizing modification is selected from the group consisting of GNA-isoC, GNA-isoG, 5′-mUNA, 4′-mUNA, 3′-mUNA, and 2′-mUNA. In some further embodiments of this, the dsRNA molecule further comprises at least one thermally destabilizing modification selected from the group consisting of GNA, 2′-OMe, 3′-OMe, 5′-Me, Hy p-spacer, SNA, hGNA, hhGNA, mGNA, TNA and h′GNA (Mod A-Mod K). In some embodiments, the Tₘ of from about 40° C. to about 80° C. is optional.

[0109] In some embodiments, the dsRNA molecule of the invention comprises a 21 nucleotides (nt) sense strand and a 23 nucleotides (nt) antisense, wherein the antisense strand contains at least one thermally destabilizing nucleotide, where the at least one thermally destabilizing nucleotide occurs in the seed region of the antisense strand (i.e., at position 2-9 of the 5′-end of the antisense strand), wherein one end of the dsRNA is blunt, while the other end is comprises a 2 nt overhang, wherein the dsRNA has a melting temperature of about 40° C. to about 80° C., and wherein the dsRNA optionally further has at least one (e.g., one, two, three, four, five, six or all seven) of the following characteristics: (i) the antisense comprises 2, 3, 4, 5 or 6 2′-fluoro modifications; (ii) the antisense comprises 1, 2, 3, 4 or 5 phosphorothioate internucleotide linkages; (iii) the sense strand is conjugated with a ligand; (iv) the sense strand comprises 2, 3, 4 or 5 2′-fluoro modifications; (v) the sense strand comprises 1, 2, 3, 4 or 5 phosphorothioate internucleotide linkages; (vi) the dsRNA comprises at least four 2′-fluoro modifications; and (vii) the dsRNA comprises a blunt end at 5′-end of the antisense strand, and wherein the destabilizing modification is selected from mUNA and GNA building blocks described in Examples 1-3 herein. In some embodiments, the destabilizing modification is selected from the group consisting of GNA-isoC, GNA-isoG, 5′-mUNA, 4′-mUNA, 3′-mUNA, and 2′-mUNA. In some further embodiments of this, the dsRNA molecule further comprises at least one thermally destabilizing modification selected from the group consisting of GNA, 2′-OMe, 3′-OMe, 5′-Me, Hy p-spacer, SNA, hGNA, hhGNA, mGNA, TNA and h′GNA (Mod A-Mod K). Preferably, the 2 nt overhang is at the 3′-end of the antisense. In some embodiments, the Tₘ of from about 40° C. to about 80° C. is optional.

[0110] In some embodiments, the dsRNA molecule of the invention comprising a sense and antisense strands, wherein: the sense strand is 25-30 nucleotide residues in length, wherein starting from the 5′ terminal nucleotide (position 1), positions 1 to 23 of said sense strand comprise at least 8 ribonucleotides; antisense strand is 36-66 nucleotide residues in length and, starting from the 3′ terminal nucleotide, at least 8 ribonucleotides in the positions paired with positions 1-23 of sense strand to form a duplex; wherein at least the 3′terminal nucleotide of antisense strand is unpaired with sense strand, and up to 6 consecutive 3′ terminal nucleotides are unpaired with sense strand, thereby forming a 3′ single stranded overhang of 1-6 nucleotides; wherein the 5′ terminus of antisense strand comprises from 10-30 consecutive nucleotides which are unpaired with sense strand, thereby forming a 10-30 nucleotide single stranded 5′ overhang; wherein at least the sense strand 5′ terminal and 3′ terminal nucleotides are base paired with nucleotides of antisense strand when sense and antisense strands are aligned for maximum complementarity, thereby forming a substantially duplexed region between sense and antisense strands; and antisense strand is sufficiently complementary to a target RNA along at least 19 ribonucleotides of antisense strand length to reduce target gene expression when said double stranded nucleic acid is introduced into a mammalian cell; and wherein the antisense strand contains at least one thermally destabilizing nucleotide, where at least one thermally destabilizing nucleotide is in the seed region of the antisense strand (i.e. at position 2-9 of the 5′-end of the antisense strand), and wherein the dsRNA has a melting temperature of about 40° C. to about 80° C., na wherein the destabilizing modification is selected from mUNA and GNA building blocks described in Examples 1-3 herein. In some embodiments, the destabilizing modification is selected from the group consisting of GNA-isoC, GNA-isoG, 5′-mUNA, 4′-mUNA, 3′-mUNA, and 2′-mUNA. In some further embodiments of this, the dsRNA molecule further comprises at least one thermally destabilizing modification selected from the group consisting of GNA, 2′-OMe, 3′-OMe, 5′-Me, Hy p-spacer, SNA, hGNA, hhGNA, mGNA, TNA and h′GNA (Mod A-Mod K). For example, the thermally destabilizing nucleotide occurs between positions opposite or complimentary to positions 14-17 of the 5′-end of the sense strand, and wherein the dsRNA optionally further has at least one (e.g., one, two, three, four, five, six or all seven) of the following characteristics: (i) the antisense comprises 2, 3, 4, 5 or 6 2′-fluoro modifications; (ii) the antisense comprises 1, 2, 3, 4 or 5 phosphorothioate internucleotide linkages; (iii) the sense strand is conjugated with a ligand; (iv) the sense strand comprises 2, 3, 4 or 5 2′-fluoro modifications; (v) the sense strand comprises 1, 2, 3, 4 or 5 phosphorothioate internucleotide linkages; and (vi) the dsRNA comprises at least four 2′-fluoro modifications; and (vii) the dsRNA comprises a duplex region of 12-30 nucleotide pairs in length. In some embodiments, the Tₘ of from about 40° C. to about 80° C. is optional.

[0111] In some embodiments, the dsRNA molecule of the invention comprises a sense and antisense strands, wherein said dsRNA molecule comprises a sense strand having a length which is at least 25 and at most 29 nucleotides and an antisense strand having a length which is at most 30 nucleotides with the sense strand comprises a modified nucleotide that is susceptible to enzymatic degradation at position 11 from the 5′end, wherein the 3′ end of said sense strand and the 5′ end of said antisense strand form a blunt end and said antisense strand is 1-4 nucleotides longer at its 3′ end than the sense strand, wherein the duplex region which is at least 25 nucleotides in length, and said antisense strand is sufficiently complementary to a target mRNA along at least 19 nt of said antisense strand length to reduce target gene expression when said dsRNA molecule is introduced into a mammalian cell, and wherein dicer cleavage of said dsRNA preferentially results in an siRNA comprising said 3′ end of said antisense strand, thereby reducing expression of the target gene in the mammal, wherein the antisense strand contains at least one thermally destabilizing nucleotide, where the at least one thermally destabilizing nucleotide is in the seed region of the antisense strand (i.e. at position 2-9 of the 5′-end of the antisense strand), wherein the dsRNA has a melting temperature of about 40° C. to about 80° C., and wherein the dsRNA optionally further has at least one (e.g., one, two, three, four, five, six or all seven) of the following characteristics: (i) the antisense comprises 2, 3, 4, 5 or 6 2′-fluoro modifications; (ii) the antisense comprises 1, 2, 3, 4 or 5 phosphorothioate internucleotide linkages; (iii) the sense strand is conjugated with a ligand; (iv) the sense strand comprises 2, 3, 4 or 5 2′-fluoro modifications; (v) the sense strand comprises 1, 2, 3, 4 or 5 phosphorothioate internucleotide linkages; and (vi) the dsRNA comprises at least four 2′-fluoro modifications; and (vii) the dsRNA has a duplex region of 12-29 nucleotide pairs in length, and wherein the destabilizing modification is selected from mUNA and GNA building blocks described in Examples 1-3 herein. In some embodiments, the destabilizing modification is selected from the group consisting of GNA-isoC, GNA-isoG, 5′-mUNA, 4′-mUNA, 3′-mUNA, and 2′-mUNA. In some further embodiments of this, the dsRNA molecule further comprises at least one thermally destabilizing modification selected from the group consisting of GNA, 2′-OMe, 3′-OMe, 5′-Me, Hy p-spacer, SNA, hGNA, hhGNA, mGNA, TNA and h′GNA (Mod A-Mod K). In some embodiments, the Tₘ of from about 40° C. to about 80° C. is optional.

[0112] In some embodiments, the antisense strand comprises phosphorothioate internucleotide linkages between nucleotide positions 21 and 22, and between nucleotide positions 22 and 23, wherein the antisense strand contains at least one thermally destabilizing modification of the duplex located in the seed region of the antisense strand (i.e., at position 2-9 of the 5′-end of the antisense strand), wherein the dsRNA has a melting temperature of about 40° C. to about 80° C., and wherein the dsRNA optionally further has at least one (e.g., one, two, three, four, five, six, seven or all eight) of the following characteristics: (i) the antisense comprises 2, 3, 4, 5 or 6 2′-fluoro modifications; (ii) the antisense comprises 3, 4 or 5 phosphorothioate internucleotide linkages; (iii) the sense strand is conjugated with a ligand; (iv) the sense strand comprises 2, 3, 4 or 5 2′-fluoro modifications; (v) the sense strand comprises 1, 2, 3, 4 or 5 phosphorothioate internucleotide linkages; (vi) the dsRNA comprises at least four 2′-fluoro modifications; (vii) the dsRNA comprises a duplex region of 12-40 nucleotide pairs in length; and (viii) the dsRNA has a blunt end at 5′-end of the antisense strand, and wherein the destabilizing modification is selected from mUNA and GNA building blocks described in Examples 1-3 herein. In some embodiments, the destabilizing modification is selected from the group consisting of GNA-isoC, GNA-isoG, 5′-mUNA, 4′-mUNA, 3′-mUNA, and 2′-mUNA. In some further embodiments of this, the dsRNA molecule further comprises at least one thermally destabilizing modification selected from the group consisting of GNA, 2′-OMe, 3′-OMe, 5′-Me, Hy p-spacer, SNA, hGNA, hhGNA, mGNA, TNA and h′GNA (Mod A-Mod K). In some embodiments, the Tₘ of from about 40° C. to about 80° C. is optional.

[0113] In some embodiments, the antisense strand comprises phosphorothioate internucleotide linkages between nucleotide positions 1 and 2, between nucleotide positions 2 and 3, between nucleotide positions 21 and 22, and between nucleotide positions 22 and 23, wherein the antisense strand contains at least one thermally destabilizing modification of the duplex located in the seed region of the antisense strand (i.e., at position 2-9 of the 5′-end of the antisense strand), wherein the dsRNA has a melting temperature of about 40° C. to about 80° C., and wherein the dsRNA optionally further has at least one (e.g., one, two, three, four, five, six, seven or all eight) of the following characteristics: (i) the antisense comprises 2, 3, 4, 5 or 6 2′-fluoro modifications; (ii) the sense strand is conjugated with a ligand; (iii) the sense strand comprises 2, 3, 4 or 5 2′-fluoro modifications; (iv) the sense strand comprises 1, 2, 3, 4 or 5 phosphorothioate internucleotide linkages; (v) the dsRNA comprises at least four 2′-fluoro modifications; (vi) the dsRNA comprises a duplex region of 12-40 nucleotide pairs in length; (vii) the dsRNA comprises a duplex region of 12-40 nucleotide pairs in length; and (viii) the dsRNA has a blunt end at 5′-end of the antisense strand, and wherein the destabilizing modification is selected from mUNA and GNA building blocks described in Examples 1-3 herein. In some embodiments, the destabilizing modification is selected from the group consisting of GNA-isoC, GNA-isoG, 5′-mUNA, 4′-mUNA, 3′-mUNA, and 2′-mUNA. In some further embodiments of this, the dsRNA molecule further comprises at least one thermally destabilizing modification selected from the group consisting of GNA, 2′-OMe, 3′-OMe, 5′-Me, Hy p-spacer, SNA, hGNA, hhGNA, mGNA, TNA and h′GNA (Mod A-Mod K). In some embodiments, the Tₘ of from about 40° C. to about 80° C. is optional.

[0114] In some embodiments, the sense strand comprises phosphorothioate internucleotide linkages between nucleotide positions 1 and 2, and between nucleotide positions 2 and 3, wherein the antisense strand contains at least one thermally destabilizing modification of the duplex located in the seed region of the antisense strand (i.e., at position 2-9 of the 5′-end of the antisense strand), wherein the dsRNA has a melting temperature of about 40° C. to about 80° C., and wherein the dsRNA optionally further has at least one (e.g., one, two, three, four, five, six, seven or all eight) of the following characteristics: (i) the antisense comprises 2, 3, 4, 5 or 6 2′-fluoro modifications; (ii) the antisense comprises 1, 2, 3, 4 or 5 phosphorothioate internucleotide linkages; (iii) the sense strand is conjugated with a ligand; (iv) the sense strand comprises 2, 3, 4 or 5 2′-fluoro modifications; (v) the sense strand comprises 3, 4 or 5 phosphorothioate internucleotide linkages; (vi) the dsRNA comprises at least four 2′-fluoro modifications; (vii) the dsRNA comprises a duplex region of 12-40 nucleotide pairs in length; and (viii) the dsRNA has a blunt end at 5′-end of the antisense strand, and wherein the destabilizing modification is selected from mUNA and GNA building blocks described in Examples 1-3 herein. In some embodiments, the destabilizing modification is selected from the group consisting of GNA-isoC, GNA-isoG, 5′-mUNA, 4′-mUNA, 3′-mUNA, and 2′-mUNA. In some further embodiments of this, the dsRNA molecule further comprises at least one thermally destabilizing modification selected from the group consisting of GNA, 2′-OMe, 3′-OMe, 5′-Me, Hy p-spacer, SNA, hGNA, hhGNA, mGNA, TNA and h′GNA (Mod A-Mod K). In some embodiments, the Tₘ of from about 40° C. to about 80° C. is optional.

[0115] In some embodiments, the sense strand comprises phosphorothioate internucleotide linkages between nucleotide positions 1 and 2, and between nucleotide positions 2 and 3, the antisense strand comprises phosphorothioate internucleotide linkages between nucleotide positions 1 and 2, between nucleotide positions 2 and 3, between nucleotide positions 21 and 22, and between nucleotide positions 22 and 23, wherein the antisense strand contains at least one thermally destabilizing modification of the duplex located in the seed region of the antisense strand (i.e., at position 2-9 of the 5′-end of the antisense strand), wherein the dsRNA has a melting temperature of about 40° C. to about 80° C., and wherein the dsRNA optionally further has at least one (e.g., one, two, three, four, five, six or all seven) of the following characteristics: (i) the antisense comprises 2, 3, 4, 5 or 6 2′-fluoro modifications; (ii) the sense strand is conjugated with a ligand; (iii) the sense strand comprises 2, 3, 4 or 5 2′-fluoro modifications; (iv) the sense strand comprises 3, 4 or 5 phosphorothioate internucleotide linkages; (v) the dsRNA comprises at least four 2′-fluoro modifications; (vi) the dsRNA comprises a duplex region of 12-40 nucleotide pairs in length; and (vii) the dsRNA has a blunt end at 5′-end of the antisense strand, and wherein the destabilizing modification is selected from mUNA and GNA building blocks described in Examples 1-3 herein. In some embodiments, the destabilizing modification is selected from the group consisting of GNA-isoC, GNA-isoG, 5′-mUNA, 4′-mUNA, 3′-mUNA, and 2′-mUNA. In some further embodiments of this, the dsRNA molecule further comprises at least one thermally destabilizing modification selected from the group consisting of GNA, 2′-OMe, 3′-OMe, 5′-Me, Hy p-spacer, SNA, hGNA, hhGNA, mGNA, TNA and h′GNA (Mod A-Mod K). In some embodiments, the Tₘ of from about 40° C. to about 80° C. is optional.

[0116] In one aspect the invention provides a dsRNA molecule capable of inhibiting the expression of a target gene, comprising a sense strand and an antisense strand, each strand having 14 to 40 nucleotides, wherein the antisense strand has sufficient complementarity to the target sequence to mediate RNA interference and wherein the antisense strand comprises at least one thermally destabilizing modification of the duplex within the seed region (i.e., at position 2-9 of the 5′-end of the antisense strand, counting from the 5′-end), and the dsRNA further has at least one (e.g., one, two, three, four, five, six seven or all eight) of the following characteristics:
[0117] (i) the antisense comprises 2, 3, 4, 5 or 6 2′-fluoro modifications;
[0118] (ii) the antisense comprises 1, 2, 3, 4 or 5 phosphorothioate internucleotide linkages;
[0119] (iii) the sense strand is conjugated with a ligand;
[0120] (iv) the sense strand comprises 2, 3, 4 or 5 2′-fluoro modifications;
[0121] (v) the sense strand comprises 1, 2, 3, 4 or 5 phosphorothioate internucleotide linkages;
[0122] (vi) the dsRNA comprises at least four 2′-fluoro modifications;
[0123] (vii) the dsRNA comprises a duplex region of 12-40 nucleotide pairs in length; and
[0124] (viii) a blunt end at 5′end of the antisense strand.

[0125] In some particular embodiments, the thermally destabilizing modification of the duplex is at position 7 of the antisense strand, counting from 5′-end of the antisense strand, wherein the destabilizing modification is selected from mUNA and GNA building blocks described in Examples 1-3 herein. In some embodiments, the destabilizing modification is selected from the group consisting of GNA-isoC, GNA-isoG, 5′-mUNA, 4′-mUNA, 3′-mUNA, and 2′-mUNA. In some further embodiments of this, the dsRNA molecule further comprises at least one thermally destabilizing modification selected from the group consisting of GNA, 2′-OMe, 3′-OMe, 5′-Me, Hy p-spacer, SNA, hGNA, hhGNA, mGNA, TNA and h′GNA (Mod A-Mod K).

[0126] In some embodiments, the thermally destabilizing modification of the duplex is at position 2, 3, 4, 5, 6, 8 or 9 of the antisense strand, counting from 5′-end of the antisense strand, wherein the destabilizing modification is selected from mUNA and GNA building blocks described in Examples 1-3 herein. In some embodiments, the destabilizing modification is selected from the group consisting of GNA-isoC, GNA-isoG, 5′-mUNA, 4′-mUNA, 3′-mUNA, and 2′-mUNA. In some further embodiments of this, the dsRNA molecule further comprises at least one thermally destabilizing modification selected from the group consisting of GNA, 2′-OMe, 3′-OMe, 5′-Me, Hy p-spacer, SNA, hGNA, hhGNA, mGNA, TNA and h′GNA (Mod A-Mod K).

[0127] In some embodiments, the dsRNA molecule comprises a sense strand and an antisense strand, each strand having 14 to 40 nucleotides, wherein the antisense strand has sufficient complementarity to the target sequence to mediate RNA interference and wherein the antisense strand comprises at least one thermally destabilizing modification of the duplex within the seed region (i.e., at position 2-9 of the 5′-end of the antisense strand, counting from the 5′-end), and the antisense strand further comprises one or both of the following characteristics:
[0128] (i) 2, 3, 4, 5 or 6 2′-fluoro modifications; and
[0129] (ii) 1, 2, 3, 4 or 5 phosphorothioate internucleotide linkages; and
   the sense strand comprises one, two or three of the following characteristics:
[0130] (i) a ligand conjugated with the sense strand;
[0131] (ii) 2, 3, 4 or 5 2′-fluoro modifications; and
[0132] (iii) 1, 2, 3, 4 or 5 phosphorothioate internucleotide linkages; and

[0133] wherein the destabilizing modification is selected from mUNA and GNA building blocks described in Examples 1-3 herein. In some embodiments, the destabilizing modification is selected from the group consisting of GNA-isoC, GNA-isoG, 5′-mUNA, 4′-mUNA, 3′-mUNA, and 2′-mUNA. In some further embodiments of this, the dsRNA molecule further comprises at least one thermally destabilizing modification selected from the group consisting of GNA, 2′-OMe, 3′-OMe, 5′-Me, Hy p-spacer, SNA, hGNA, hhGNA, mGNA, TNA and h′GNA (Mod A-Mod K).

[0134] In some embodiments, the dsRNA molecule comprises a sense strand and an antisense strand, each strand having 14 to 40 nucleotides, wherein the antisense strand has sufficient complementarity to the target sequence to mediate RNA interference and wherein the antisense strand comprises at least one thermally destabilizing modification of the duplex within the first 9 nucleotide positions counting from the 5′-end, and a ligand is conjugated with the sense strand, wherein the destabilizing modification is selected from mUNA and GNA building blocks described in Examples 1-3 herein. In some embodiments, the destabilizing modification is selected from the group consisting of GNA-isoC, GNA-isoG, 5′-mUNA, 4′-mUNA, 3′-mUNA, and 2′-mUNA. In some further embodiments of this, the dsRNA molecule further comprises at least one thermally destabilizing modification selected from the group consisting of GNA, 2′-OMe, 3′-OMe, 5′-Me, Hy p-spacer, SNA, hGNA, hhGNA, mGNA, TNA and h′GNA (Mod A-Mod K).

[0135] In some embodiments, the dsRNA molecule comprises a sense strand and an antisense strand, each strand having 14 to 40 nucleotides, wherein the antisense strand has sufficient complementarity to the target sequence to mediate RNA interference and wherein the antisense strand comprises at least one thermally destabilizing modification of the duplex within the first 9 nucleotide positions counting from the 5′-end, a ligand is conjugated with the sense strand, and the dsRNA comprises at least four 2′-fluoro modifications, wherein the destabilizing modification is selected from mUNA and GNA building blocks described in Examples 1-3 herein. In some embodiments, the destabilizing modification is selected from the group consisting of GNA-isoC, GNA-isoG, 5′-mUNA, 4′-mUNA, 3′-mUNA, and 2′-mUNA. In some further embodiments of this, the dsRNA molecule further comprises at least one thermally destabilizing modification selected from the group consisting of GNA, 2′-OMe, 3′-OMe, 5′-Me, Hy p-spacer, SNA, hGNA, hhGNA, mGNA, TNA and h′GNA (Mod A-Mod K).

[0136] In some embodiments, the dsRNA molecule comprises a sense strand and an antisense strand, each strand having 14 to 40 nucleotides, wherein the antisense strand has sufficient complementarity to the target sequence to mediate RNA interference, wherein the dsRNA comprises at least four 2′-fluoro, wherein said antisense strand comprises at least one thermally destabilizing modification of the duplex within the first 9 nucleotide positions, counting from the 5′-end, and wherein said sense strand comprises a ligand. In some further embodiments of this, the ligand is an ASGPR ligand, wherein the destabilizing modification is selected from mUNA and GNA building blocks described in Examples 1-3 herein. In some embodiments, the destabilizing modification is selected from the group consisting of GNA-isoC, GNA-isoG, 5′-mUNA, 4′-mUNA, 3′-mUNA, and 2′-mUNA. In some further embodiments of this, the dsRNA molecule further comprises at least one thermally destabilizing modification selected from the group consisting of GNA, 2′-OMe, 3′-OMe, 5′-Me, Hy p-spacer, SNA, hGNA, hhGNA, mGNA, TNA and h′GNA (Mod A-Mod K).

[0137] In some embodiments, the dsRNA molecule comprises a sense strand and an antisense strand, each strand having 14 to 40 nucleotides, wherein the antisense strand has sufficient complementarity to the target sequence to mediate RNA interference, wherein said antisense strand comprises at least one thermally destabilizing modification of the duplex located in position 4-8, counting from the 5′-end, wherein said sense strand comprises a ligand, and wherein each of the sense and antisense strands comprise at least two 2′-fluoro modifications, wherein the destabilizing modification is selected from mUNA and GNA building blocks described in Examples 1-3 herein. In some embodiments, the destabilizing modification is selected from the group consisting of GNA-isoC, GNA-isoG, 5′-mUNA, 4′-mUNA, 3′-mUNA, and 2′-mUNA. In some further embodiments of this, the dsRNA molecule further comprises at least one thermally destabilizing modification selected from the group consisting of GNA, 2′-OMe, 3′-OMe, 5′-Me, Hy p-spacer, SNA, hGNA, hhGNA, mGNA, TNA and h′GNA (Mod A-Mod K). In some further embodiments of this, the ligand is an ASGPR ligand.

[0138] In some embodiments, the dsRNA molecule comprises a sense strand and an antisense strand, each strand having 14 to 40 nucleotides, wherein the antisense strand has sufficient complementarity to the target sequence to mediate RNA interference, wherein the dsRNA comprises at least four 2′-fluoro, wherein said antisense strand comprises at least one thermally destabilizing modification of the duplex within the first 9 nucleotide positions, counting from the 5′-end, and wherein said sense strand comprises a ligand, and wherein the antisense further comprises at least two of the following characteristics: (i) the thermally destabilizing modification of the duplex is located in position 4 to 8 of the antisense strand; (ii) at least two 2′-fluoro modifications; (iii) phosphorothioate internucleotide linkages between nucleotide positions 1 and 2 (counting from the 5′ end); and antisense strand has a length of 18 to 35 nucleotides, wherein the destabilizing modification is selected from mUNA and GNA building blocks described in Examples 1-3 herein. In some embodiments, the destabilizing modification is selected from the group consisting of GNA-isoC, GNA-isoG, 5′-mUNA, 4′-mUNA, 3′-mUNA, and 2′-mUNA. In some further embodiments of this, the dsRNA molecule further comprises at least one thermally destabilizing modification selected from the group consisting of GNA, 2′-OMe, 3′-OMe, 5′-Me, Hy p-spacer, SNA, hGNA, hhGNA, mGNA, TNA and h′GNA (Mod A-Mod K). In some further embodiments the ligand is an ASGPR ligand.

[0139] In some embodiments, the dsRNA molecule comprises a sense strand and an antisense strand, each strand having 14 to 40 nucleotides, wherein the antisense strand has sufficient complementarity to the target sequence to mediate RNA interference, wherein the dsRNA comprises at least four 2′-fluoro, wherein said antisense strand comprises at least one thermally destabilizing modification of the duplex within the first 9 nucleotide positions, counting from the 5′-end, and wherein said sense strand comprises a ligand, and the sense strand has at least one of the following characteristics: (i) the ligand is attached to either end of the sense strand; (ii) sense strand comprises at least two 2′-fluoro modifications; and (iii) the sense strand and the antisense strand show sufficient complementarity to form a double stranded region spanning at least 19 nucleotide positions and wherein the thermally destabilizing modification of the duplex is located within said double-stranded region, and wherein the destabilizing modification is selected from mUNA and GNA building blocks described in Examples 1-3 herein. In some embodiments, the destabilizing modification is selected from the group consisting of GNA-isoC, GNA-isoG, 5′-mUNA, 4′-mUNA, 3′-mUNA, and 2′-mUNA. In some further embodiments of this, the dsRNA molecule further comprises at least one thermally destabilizing modification selected from the group consisting of GNA, 2′-OMe, 3′-OMe, 5′-Me, Hy p-spacer, SNA, hGNA, hhGNA, mGNA, TNA and h′GNA (Mod A-Mod K).

[0140] In some embodiments, the dsRNA molecule comprises a sense strand and an antisense strand, each strand having 14 to 40 nucleotides, wherein the antisense strand has sufficient complementarity to the target sequence to mediate RNA interference, wherein the dsRNA comprises at least four 2′-fluoro, wherein said antisense strand comprises at least one thermally destabilizing modification of the duplex within the first 9 nucleotide positions, counting from the 5′-end, and wherein said sense strand comprises a ligand, and wherein the destabilizing modification is selected from mUNA and GNA building blocks described in Examples 1-3 herein. In some embodiments, the destabilizing modification is selected from the group consisting of GNA-isoC, GNA-isoG, 5′-mUNA, 4′-mUNA, 3′-mUNA, and 2′-mUNA. In some further embodiments of this, the dsRNA molecule further comprises at least one thermally destabilizing modification selected from the group consisting of GNA, 2′-OMe, 3′-OMe, 5′-Me, Hy p-spacer, SNA, hGNA, hhGNA, mGNA, TNA and h′GNA (Mod A-Mod K).

[0141] In some embodiments, the dsRNA molecule comprises a sense strand and an antisense strand, each strand having 14 to 40 nucleotides, wherein the antisense strand has sufficient complementarity to the target sequence to mediate RNA interference, wherein said antisense strand comprises at least one thermally destabilizing modification of the duplex located in position 4-8, counting from the 5′-end, wherein said sense strand comprises a ligand, and wherein each of the sense and antisense strands comprise at least two 2′-fluoro modifications, and wherein the destabilizing modification is selected from mUNA and GNA building blocks described in Examples 1-3 herein. In some embodiments, the destabilizing modification is selected from the group consisting of GNA-isoC, GNA-isoG, 5′-mUNA, 4′-mUNA, 3′-mUNA, and 2′-mUNA. In some further embodiments of this, the dsRNA molecule further comprises at least one thermally destabilizing modification selected from the group consisting of GNA, 2′-OMe, 3′-OMe, 5′-Me, Hy p-spacer, SNA, hGNA, hhGNA, mGNA, TNA and h′GNA (Mod A-Mod K).

[0142] In some embodiments, the dsRNA molecule comprises a sense strand and an antisense strand, each strand having 14 to 40 nucleotides, wherein the antisense strand has sufficient complementarity to the target sequence to mediate RNA interference, wherein the dsRNA comprises at least four 2′-fluoro, wherein said antisense strand comprises at least one thermally destabilizing modification of the duplex located at position 7, counting from the 5′-end of the antisense strand, and wherein said sense strand comprises a ligand, wherein the destabilizing modification is selected from mUNA and GNA building blocks described in Examples 1-3 herein. In some embodiments, the destabilizing modification is selected from the group consisting of GNA-isoC, GNA-isoG, 5′-mUNA, 4′-mUNA, 3′-mUNA, and 2′-mUNA. In some further embodiments of this, the dsRNA molecule further comprises at least one thermally destabilizing modification selected from the group consisting of GNA, 2′-OMe, 3′-OMe, 5′-Me, Hy p-spacer, SNA, hGNA, hhGNA, mGNA, TNA and h′GNA (Mod A-Mod K).

[0143] In some embodiments, the dsRNA molecule comprises a sense strand and an antisense strand, each strand having 14 to 40 nucleotides, wherein the antisense strand has sufficient complementarity to the target sequence to mediate RNA interference, wherein said antisense strand comprises at least one thermally destabilizing modification of the duplex located at position 7, counting from the 5′-end, wherein said sense strand comprises a ligand, and wherein each of the sense and antisense strands comprise at least two 2′-fluoro modifications, and wherein the destabilizing modification is selected from mUNA and GNA building blocks described in Examples 1-3 herein. In some embodiments, the destabilizing modification is selected from the group consisting of GNA-isoC, GNA-isoG, 5′-mUNA, 4′-mUNA, 3′-mUNA, and 2′-mUNA. In some further embodiments of this, the dsRNA molecule further comprises at least one thermally destabilizing modification selected from the group consisting of GNA, 2′-OMe, 3′-OMe, 5′-Me, Hy p-spacer, SNA, hGNA, hhGNA, mGNA, TNA and h′GNA (Mod A-Mod K).

[0144] In some embodiments, the dsRNA molecule comprises a sense strand and an antisense strand, each strand having 14 to 40 nucleotides, wherein the antisense strand has sufficient complementarity to the target sequence to mediate RNA interference, wherein the dsRNA comprises at least four 2′-fluoro, wherein said antisense strand comprises at least one thermally destabilizing modification of the duplex within the first 9 nucleotide positions, counting from the 5′-end, and wherein said sense strand comprises a ligand, wherein the ligand comprises one or more GalNAc derivatives attached through a bivalent or trivalent branched linker, wherein the destabilizing modification is selected from mUNA and GNA building blocks described in Examples 1-3 herein. In some embodiments, the destabilizing modification is selected from the group consisting of GNA-isoC, GNA-isoG, 5′-mUNA, 4′-mUNA, 3′-mUNA, and 2′-mUNA. In some further embodiments of this, the dsRNA molecule further comprises at least one thermally destabilizing modification selected from the group consisting of GNA, 2′-OMe, 3′-OMe, 5′-Me, Hy p-spacer, SNA, hGNA, hhGNA, mGNA, TNA and h′GNA (Mod A-Mod K).

[0145] In some embodiments, the dsRNA molecule comprises a sense strand and an antisense strand, each strand having 14 to 40 nucleotides, wherein the antisense strand has sufficient complementarity to the target sequence to mediate RNA interference, wherein the dsRNA comprises at least four 2′-fluoro, wherein said antisense strand comprises at least one thermally destabilizing modification of the duplex within the first 9 nucleotide positions, counting from the 5′-end, and wherein said sense strand comprises a ligand, wherein the ligand is an ASGPR ligand of structure:

[chemical structure]

and wherein the destabilizing modification is selected from mUNA and GNA building blocks described in Examples 1-3 herein. In some embodiments, the destabilizing modification is selected from the group consisting of GNA-isoC, GNA-isoG, 5′-mUNA, 4′-mUNA, 3′-mUNA, and 2′-mUNA. In some further embodiments of this, the dsRNA molecule further comprises at least one thermally destabilizing modification selected from the group consisting of GNA, 2′-OMe, 3′-OMe, 5′-Me, Hy p-spacer, SNA, hGNA, hhGNA, mGNA, TNA and h′GNA (Mod A-Mod K).

[0146] In some embodiments, the sense and antisense strands are independently 19, 20, 21, 22, 23, 24 or 25 nucleotides in length; the antisense strand contains at least one thermally destabilizing nucleotide, where the at least one thermally destabilizing nucleotide is in the seed region of the antisense strand (i.e., at position 2-9 of the 5′-end of the antisense strand); wherein the sense strand is conjugated with a ligand, comprises 3 or 4 2′-fluoro modifications, and comprises 0, 1, 2 or 3 phosphorothioate internucleotide linkages; wherein the antisense strand comprises 3, 4, 5 or 6 2′-fluoro modifications, comprises 2, 3, 4 or 5 phosphorothioate internucleotide linkages; and wherein the dsRNA optionally further has at least one (e.g., one, two or all three) of the following characteristics: (i) the dsRNA comprises a duplex region of 12-25 nucleotide pairs in length; (ii) the dsRNA comprises a blunt end at 5′-end of the antisense strand; and (iii) the dsRNA has at least a two nucleotide overhang at the 3′-end of the antisense strand, and wherein the destabilizing modification is selected from mUNA and GNA building blocks described in Examples 1-3 herein. In some embodiments, the destabilizing modification is selected from the group consisting of GNA-isoC, GNA-isoG, 5′-mUNA, 4′-mUNA, 3′-mUNA, and 2′-mUNA. In some further embodiments of this, the dsRNA molecule further comprises at least one thermally destabilizing modification selected from the group consisting of GNA, 2′-OMe, 3′-OMe, 5′-Me, Hy p-spacer, SNA, hGNA, hhGNA, mGNA, TNA and h′GNA (Mod A-Mod K).

[0147] In some embodiments, the sense and antisense strands are independently 19, 20, 21, 22, 23, 24 or 25 nucleotides in length; the antisense strand contains at least one thermally destabilizing nucleotide, where the at least one thermally destabilizing nucleotide is in the seed region of the antisense strand (i.e., at position 2-9 of the 5′-end of the antisense strand); wherein the sense strand is conjugated with a ligand, comprises 2′-fluoro modifications at positions 7, 10 and 11 or at positions 7, 9, 10 and 11 (counting from 5′-end of the sense strand), and optionally comprises phosphorothioate internucleotide linkages between nucleotide positions 1 and 2, and between nucleotide positions 2 and 3; wherein the antisense strand comprises 3, 4, 5 or 6 2′-fluoro modifications, comprises 2, 3, 4 or 5 phosphorothioate internucleotide linkages; and wherein the dsRNA optionally further has at least one (e.g., one, two or all three) of the following characteristics: (i) the dsRNA comprises a duplex region of 12-25 nucleotide pairs in length; (ii) the dsRNA comprises a blunt end at 5′-end of the antisense strand; and (iii) the dsRNA has at least a two nucleotide overhang at the 3′-end of the antisense strand, and wherein the destabilizing modification is selected from mUNA and GNA building blocks described in Examples 1-3 herein. In some embodiments, the destabilizing modification is selected from the group consisting of GNA-isoC, GNA-isoG, 5′-mUNA, 4′-mUNA, 3′-mUNA, and 2′-mUNA. In some further embodiments of this, the dsRNA molecule further comprises at least one thermally destabilizing modification selected from the group consisting of GNA, 2′-OMe, 3′-OMe, 5′-Me, Hy p-spacer, SNA, hGNA, hhGNA, mGNA, TNA and h′GNA (Mod A-Mod K).

[0148] In some embodiments, the sense and antisense strands are independently 19, 20, 21, 22, 23, 24 or 25 nucleotides in length; the antisense strand contains at least one thermally destabilizing nucleotide, where the at least one thermally destabilizing nucleotide is in the seed region of the antisense strand (i.e., at position 2-9 of the 5′-end of the antisense strand); wherein the sense strand is conjugated with a ligand, comprises 3 or 4 2′-fluoro modifications, and comprises 0, 1, 2 or 3 phosphorothioate internucleotide linkages; wherein the antisense strand comprises 2′-fluoro modifications at positions 2, 6, 8, 9, 14 or 16, or at positions 2, 6, 14 or 16, or at positions 2, 14 and 16; and the antisense comprises phosphorothioate internucleotide linkages between nucleotide positions 21 and 22, and between nucleotide positions 22 and 23; and wherein the dsRNA optionally further has at least one (e.g., one, two or all three) of the following characteristics: (i) the dsRNA comprises a duplex region of 12-25 nucleotide pairs in length; (ii) the dsRNA comprises a blunt end at 5′-end of the antisense strand; and (iii) the dsRNA has at least a two nucleotide overhang at the 3′-end of the antisense strand, and wherein the destabilizing modification is selected from mUNA and GNA building blocks described in Examples 1-3 herein. In some embodiments, the destabilizing modification is selected from the group consisting of GNA-isoC, GNA-isoG, 5′-mUNA, 4′-mUNA, 3′-mUNA, and 2′-mUNA. In some further embodiments of this, the dsRNA molecule further comprises at least one thermally destabilizing modification selected from the group consisting of GNA, 2′-OMe, 3′-OMe, 5′-Me, Hy p-spacer, SNA, hGNA, hhGNA, mGNA, TNA and h′GNA (Mod A-Mod K).

[0149] In some embodiments, the sense and antisense strands are independently 19, 20, 21, 22, 23, 24 or 25 nucleotides in length; the antisense strand contains at least one thermally destabilizing nucleotide, where the at least one thermally destabilizing nucleotide is in the seed region of the antisense strand (i.e., at position 2-9 of the 5′-end of the antisense strand); wherein the sense strand is conjugated with a ligand, comprises 3 or 4 2′-fluoro modifications, and comprises 0, 1, 2 or 3 phosphorothioate internucleotide linkages; wherein the antisense strand comprises 2′-fluoro modifications at positions 2, 6, 8, 9, 14 or 16, or at positions 2, 6, 14 or 16, or at positions 2, 14 and 16; and the antisense comprises phosphorothioate internucleotide linkages between nucleotide positions 21 and 22, between nucleotide positions 22 and 23, between nucleotide positions 1 and 2, between nucleotide positions 2 and 3; and wherein the dsRNA optionally further has at least one (e.g., one, two or all three) of the following characteristics: (i) the dsRNA comprises a duplex region of 12-25 nucleotide pairs in length; (ii) the dsRNA comprises a blunt end at 5′-end of the antisense strand; and (iii) the dsRNA has at least a two nucleotide overhang at the 3′-end of the antisense strand, wherein the destabilizing modification is selected from mUNA and GNA building blocks described in Examples 1-3 herein. In some embodiments, the destabilizing modification is selected from the group consisting of GNA-isoC, GNA-isoG, 5′-mUNA, 4′-mUNA, 3′-mUNA, and 2′-mUNA. In some further embodiments of this, the dsRNA molecule further comprises at least one thermally destabilizing modification selected from the group consisting of GNA, 2′-OMe, 3′-OMe, 5′-Me, Hy p-spacer, SNA, hGNA, hhGNA, mGNA, TNA and h′GNA (Mod A-Mod K).

[0150] In some embodiments, the sense and antisense strands are independently 19, 20, 21, 22, 23, 24 or 25 nucleotides in length; the antisense strand contains at least one thermally destabilizing nucleotide, where the at least one thermally destabilizing nucleotide is in the seed region of the antisense strand (i.e., at position 2-9 of the 5′-end of the antisense strand); wherein the sense strand is conjugated with a ligand, comprises 2′-fluoro modifications at positions 7, 10 and 11 or at positions 7, 9, 10 and 11 (counting from 5′-end of the sense strand), and optionally comprises phosphorothioate internucleotide linkages between nucleotide positions 1 and 2, and between nucleotide positions 2 and 3; wherein the antisense strand comprises 2′-fluoro modifications at positions 2, 6, 8, 9, 14 or 16, or at positions 2, 6, 14 or 16, or at positions 2, 14 and 16; and the antisense comprises phosphorothioate internucleotide linkages between nucleotide positions 21 and 22, and between nucleotide positions 22 and 23; and wherein the dsRNA optionally further has at least one (e.g., one, two or all three) of the following characteristics: (i) the dsRNA comprises a duplex region of 12-25 nucleotide pairs in length; (ii) the dsRNA comprises a blunt end at 5′-end of the antisense strand; and (iii) the dsRNA has at least a two nucleotide overhang at the 3′-end of the antisense strand, and wherein the destabilizing modification is selected from mUNA and GNA building blocks described in Examples 1-3 herein. In some embodiments, the destabilizing modification is selected from the group consisting of GNA-isoC, GNA-isoG, 5′-mUNA, 4′-mUNA, 3′-mUNA, and 2′-mUNA. In some further embodiments of this, the dsRNA molecule further comprises at least one thermally destabilizing modification selected from the group consisting of GNA, 2′-OMe, 3′-OMe, 5′-Me, Hy p-spacer, SNA, hGNA, hhGNA, mGNA, TNA and h′GNA (Mod A-Mod K).

[0151] In some embodiments, the sense and antisense strands are independently 19, 20, 21, 22, 23, 24 or 25 nucleotides in length; the antisense strand contains at least one thermally destabilizing nucleotide, where the at least one thermally destabilizing nucleotide is in the seed region of the antisense strand (i.e., at position 2-9 of the 5′-end of the antisense strand); wherein the sense strand is conjugated with a ligand, comprises 2′-fluoro modifications at positions 7, 10 and 11 or at positions 7, 9, 10 and 11 (counting from 5′-end of the sense strand), and optionally comprises phosphorothioate internucleotide linkages between nucleotide positions 1 and 2, and between nucleotide positions 2 and 3; wherein the antisense strand comprises 2′-fluoro modifications at positions 2, 6, 8, 9, 14 or 16, or at positions 2, 6, 14 or 16, or at positions 2, 14 and 16; and the antisense comprises phosphorothioate internucleotide linkages between nucleotide positions 21 and 22, between nucleotide positions 22 and 23, between nucleotide positions 1 and 2, between nucleotide positions 2 and 3; and wherein the dsRNA optionally further has at least one (e.g., one, two or all three) of the following characteristics: (i) the dsRNA comprises a duplex region of 12-25 nucleotide pairs in length; (ii) the dsRNA comprises a blunt end at 5′-end of the antisense strand; and (iii) the dsRNA has at least a two nucleotide overhang at the 3′-end of the antisense strand, and wherein the destabilizing modification is selected from mUNA and GNA building blocks described in Examples 1-3 herein. In some embodiments, the destabilizing modification is selected from the group consisting of GNA-isoC, GNA-isoG, 5′-mUNA, 4′-mUNA, 3′-mUNA, and 2′-mUNA. In some further embodiments of this, the dsRNA molecule further comprises at least one thermally destabilizing modification selected from the group consisting of GNA, 2′-OMe, 3′-OMe, 5′-Me, Hy p-spacer, SNA, hGNA, hhGNA, mGNA, TNA and h′GNA (Mod A-Mod K).

[0152] In a particular embodiment, the dsRNA molecules of the present invention comprise:
[0153] (a) a sense strand having:
   [0154] (i) a length of 21 nucleotides;
   [0155] (ii) an ASGPR ligand attached to the 3′-end, wherein said ASGPR ligand comprises three GalNAc derivatives attached through a trivalent branched linker; and
   [0156] (iii) 2′-F modifications at positions 7, 10, and 11 (counting from the 5′ end);
   [0157] and
[0158] (b) an antisense strand having:
   [0159] (i) a length of 23 nucleotides;
   [0160] (ii) 2′-F modifications at positions 2, 6 to 8, 9, 14, and 16 (counting from the 5′ end);
   [0161] (iii) phosphorothioate internucleotide linkages between nucleotide positions 21 and 22, and between nucleotide positions 22 and 23 (counting from the 5′ end); and
   [0162] (iv) a thermally destabilizing modification of the duplex at position 7 (counting from the 5′ end);
      [0163] wherein the dsRNA molecules have a two nucleotide overhang at the 3′-end of the antisense strand, and a blunt end at the 5′-end of the antisense strand, and wherein the destabilizing modification is selected from mUNA and GNA building blocks described in Examples 1-3 herein. In some embodiments, the destabilizing modification is selected from the group consisting of GNA-isoC, GNA-isoG, 5′-mUNA, 4′-mUNA, 3′-mUNA, and 2′-mUNA. In some further embodiments of this, the dsRNA molecule further comprises at least one thermally destabilizing modification selected from the group consisting of GNA, 2′-OMe, 3′-OMe, 5′-Me, Hy p-spacer, SNA, hGNA, hhGNA, mGNA, TNA and h′GNA (Mod A-Mod K).

[0164] In another particular embodiment, the dsRNA molecules of the present invention comprise:
[0165] (a) a sense strand having:
   [0166] (i) a length of 21 nucleotides;
   [0167] (ii) an ASGPR ligand attached to the 3′-end, wherein said ASGPR ligand comprises three GalNAc derivatives attached through a trivalent branched linker;
   [0168] (iii) 2′-F modifications at positions 7, 9, 10, and 11 (counting from the 5′ end); and
   [0169] (iv) phosphorothioate internucleotide linkages between nucleotide positions 1 and 2, and between nucleotide positions 2 and 3 (counting from the 5′ end);
   [0170] and
[0171] (b) an antisense strand having:
   [0172] (i) a length of 23 nucleotides;
   [0173] (ii) 2′-F modifications at positions 2, 6, 14, and 16 (counting from the 5′ end);
   [0174] (iii) phosphorothioate internucleotide linkages between nucleotide positions 1 and 2, between nucleotide positions 2 and 3, between nucleotide positions 21 and 22, and between nucleotide positions 22 and 23 (counting from the 5′ end); and
   [0175] (iv) a thermally destabilizing modification of the duplex at position 7 (counting from the 5′ end);
      wherein the dsRNA molecules have a two nucleotide overhang at the 3′-end of the antisense strand, and a blunt end at the 5′-end of the antisense strand, and wherein the destabilizing modification is selected from mUNA and GNA building blocks described in Examples 1-3 herein. In some embodiments, the destabilizing modification is selected from the group consisting of GNA-isoC, GNA-isoG, 5′-mUNA, 4′-mUNA, 3′-mUNA, and 2′-mUNA. In some further embodiments of this, the dsRNA molecule further comprises at least one thermally destabilizing modification selected from the group consisting of GNA, 2′-OMe, 3′-OMe, 5′-Me, Hy p-spacer, SNA, hGNA, hhGNA, mGNA, TNA and h′GNA (Mod A-Mod K).

[0176] In another particular embodiment, the dsRNA molecules of the present invention comprise:
[0177] (a) a sense strand having:
   [0178] (i) a length of 21 nucleotides;
   [0179] (ii) an ASGPR ligand attached to the 3′-end, wherein said ASGPR ligand comprises three GalNAc derivatives attached through a trivalent branched linker;
   [0180] (iii) 2′-F modifications at positions 7, 9, 10, and 11 (counting from the 5′ end); and
   [0181] (iv) phosphorothioate internucleotide linkages between nucleotide positions 1 and 2, and between nucleotide positions 2 and 3 (counting from the 5′ end);
   [0182] and
[0183] (b) an antisense strand having:
   [0184] (i) a length of 23 nucleotides;
   [0185] (ii) 2′-F modifications at positions 2, 14, and 16 (counting from the 5′ end);
   [0186] (iii) phosphorothioate internucleotide linkages between nucleotide positions 1 and 2, between nucleotide positions 2 and 3, between nucleotide positions 21 and 22, and between nucleotide positions 22 and 23 (counting from the 5′ end); and
   [0187] (iv) a thermally destabilizing modification of the duplex at position 6 or 7 (counting from the 5′ end);
      wherein the dsRNA molecules have a two nucleotide overhang at the 3′-end of the antisense strand, and a blunt end at the 5′-end of the antisense strand, and wherein the destabilizing modification is selected from mUNA and GNA building blocks described in Examples 1-3 herein. In some embodiments, the destabilizing modification is selected from the group consisting of GNA-isoC, GNA-isoG, 5′-mUNA, 4′-mUNA, 3′-mUNA, and 2′-mUNA. In some further embodiments of this, the dsRNA molecule further comprises at least one thermally destabilizing modification selected from the group consisting of GNA, 2′-OMe, 3′-OMe, 5′-Me, Hy p-spacer, SNA, hGNA, hhGNA, mGNA, TNA and h′GNA (Mod A-Mod K).

[0188] In another particular embodiment, the dsRNA molecules of the present invention comprise:
[0189] (a) a sense strand having:
[0190] (i) a length of 21 nucleotides;
[0191] (ii) an ASGPR ligand attached to the 3′-end, wherein said ASGPR ligand comprises three GalNAc derivatives attached through a trivalent branched linker;
[0192] (iii) 2′-F modifications at positions 7, 9, 10, and 11 (counting from the 5′ end); and
[0193] (iv) phosphorothioate internucleotide linkages between nucleotide positions 1 and 2, and between nucleotide positions 2 and 3 (counting from the 5′ end);
[0194] and
[0195] (b) an antisense strand having:
[0196] (i) a length of 23 nucleotides;
[0197] (ii) 2′-F modifications at positions 2, 6, 8, 9, 14, and 16 (counting from the 5′ end);
[0198] (iii) phosphorothioate internucleotide linkages between nucleotide positions 1 and 2, between nucleotide positions 2 and 3, between nucleotide positions 21 and 22, and between nucleotide positions 22 and 23 (counting from the 5′ end); and
[0199] (iv) a thermally destabilizing modification of the duplex at position 7 (counting from the 5′ end); wherein the dsRNA molecules have a two nucleotide overhang at the 3′-end of the antisense strand, and a blunt end at the 5′-end of the antisense strand, wherein the destabilizing modification is selected from mUNA and GNA building blocks described in Examples 1-3 herein. In some embodiments, the destabilizing modification is selected from the group consisting of GNA-isoC, GNA-isoG, 5′-mUNA, 4′-mUNA, 3′-mUNA, and 2′-mUNA. In some further embodiments of this, the dsRNA molecule further comprises at least one thermally destabilizing modification selected from the group consisting of GNA, 2′-OMe, 3′-OMe, 5′-Me, Hy p-spacer, SNA, hGNA, hhGNA, mGNA, TNA and h′GNA (Mod A-Mod K).

[0200] In another particular embodiment, the dsRNA molecules of the present invention comprising an antisense strand having:
[0201] (i) 2′-F modifications at positions 2, 14, and 16 (counting from the 5′ end); and
[0202] (ii) a thermally destabilizing modification of the duplex at position 6 or 7 (counting from the 5′ end), wherein the destabilizing modification is selected from mUNA and GNA building blocks described in Examples 1-3 herein. In some embodiments, the destabilizing modification is selected from the group consisting of GNA-isoC, GNA-isoG, 5′-mUNA, 4′-mUNA, 3′-mUNA, and 2′-mUNA. In some further embodiments of this, the dsRNA molecule further comprises at least one thermally destabilizing modification selected from the group consisting of GNA, 2′-OMe, 3′-OMe, 5′-Me, Hy p-spacer, SNA, hGNA, hhGNA, mGNA, TNA and h′GNA (Mod A-Mod K).

[0203] In another particular embodiment, the dsRNA molecules of the present invention comprise:
[0204] (a) a sense strand having:
   [0205] (i) an ASGPR ligand, wherein said ASGPR ligand comprises three GalNAc derivatives attached through a trivalent branched linker;
   [0206] (ii) phosphorothioate internucleotide linkages between nucleotide positions 1 and 2, and between nucleotide positions 2 and 3 (counting from the 5′ end);
   [0207] and
[0208] (b) an antisense strand having:
   [0209] (i) 2′-F modifications at positions 2, 14, and 16 (counting from the 5′ end);
   [0210] (ii) a thermally destabilizing modification of the duplex at position 6 or 7 (counting from the 5′ end), wherein the destabilizing modification is selected from mUNA and GNA building blocks described in Examples 1-3 herein. In some embodiments, the destabilizing modification is selected from the group consisting of GNA-isoC, GNA-isoG, 5′-mUNA, 4′-mUNA, 3′-mUNA, and 2′-mUNA. In some further embodiments of this, the dsRNA molecule further comprises at least one thermally destabilizing modification selected from the group consisting of GNA, 2′-OMe, 3′-OMe, 5′-Me, Hy p-spacer, SNA, hGNA, hhGNA, mGNA, TNA and h′GNA (Mod A-Mod K).

[0211] In another particular embodiment, the dsRNA molecules of the present invention comprise:
[0212] (a) a sense strand having:
   [0213] (i) an ASGPR ligand attached to the 3′-end, wherein said ASGPR ligand comprises three GalNAc derivatives attached through a trivalent branched linker;
   [0214] (ii) phosphorothioate internucleotide linkages between nucleotide positions 1 and 2, and between nucleotide positions 2 and 3 (counting from the 5′ end);
[0215] and
[0216] (b) an antisense strand having:
   [0217] (ii) 2′-F modifications at positions 2, 14, and 16 (counting from the 5′ end);
   [0218] (iii) phosphorothioate internucleotide linkages between nucleotide positions 1 and 2, between nucleotide positions 2 and 3, between nucleotide positions 21 and 22, and between nucleotide positions 22 and 23 (counting from the 5′ end); and
   [0219] (iv) a thermally destabilizing modification of the duplex at position 6 or 7 (counting from the 5′ end);
      wherein the dsRNA molecules have a two nucleotide overhang at the 3′-end of the antisense strand, and a blunt end at the 5′-end of the antisense strand, wherein the destabilizing modification is selected from mUNA and GNA building blocks described in Examples 1-3 herein. In some embodiments, the destabilizing modification is selected from the group consisting of GNA-isoC, GNA-isoG, 5′-mUNA, 4′-mUNA, 3′-mUNA, and 2′-mUNA. In some further embodiments of this, the dsRNA molecule further comprises at least one thermally destabilizing modification selected from the group consisting of GNA, 2′-OMe, 3′-OMe, 5′-Me, Hy p-spacer, SNA, hGNA, hhGNA, mGNA, TNA and h′GNA (Mod A-Mod K).

[0220] In some embodiments, the dsRNA molecule further comprises at least one ASGPR ligand. For example, the ASGPR ligand is one or more GalNAc derivatives attached through a bivalent or trivalent branched linker, such as:

[chemical structure]

[0221] In one example, the ASGPR ligand is attached to the 3′ end of the sense strand.

[0222] In some cases 2′-fluoro modifications in the seed region of the antisense strand, e.g., positions 2-9, particularly positions 3-9, can adversely affect the in vivo activity of the dsRNA while having minimal effect on in vitro potency of the dsRNA. Inventors have discovered inter alia that in vivo activity of such dsRNAs can be restored to comparable levels relative to the parent dsRNA by removing—some or all of 2′-fluoro modifications from the seed region of the antisense strand, i.e., position 2-9, particularly position 3-9 counting from the 5′-end.

[0223] Accordingly, in some embodiments, the invention provides a dsRNA molecule capable of inhibiting the expression of a target gene, comprising a sense strand and an antisense strand, each strand having 14 to 40 nucleotides, wherein the antisense strand has sufficient complementarity to the target sequence to mediate RNA interference and wherein the antisense strand comprises at least one thermally destabilizing modification of the duplex within the seed region (i.e., at position 2-9 of the 5′-end of the antisense strand, counting from the 5′-end), and the dsRNA further has at least one (e.g., one, two, three, four, five, six seven, eight, nine or all ten) of the following characteristics: (i) a melting temperature (Tₘ) of from about 40° C. to about 80° C.; (ii) the antisense comprises 2, 3, 4, 5, 6, 7, 8, 9, or 10 2′-fluoro modifications; (iii) the antisense comprises 1, 2, 3, 4 or 5 phosphorothioate internucleotide linkages; (iv) the sense strand is conjugated with a ligand; (v) the sense strand comprises 2, 3, 4 or 5 2′-fluoro modifications; (vi) the sense strand comprises 1, 2, 3, 4 or 5 phosphorothioate internucleotide linkages; (vii) the dsRNA comprises at least four 2′-fluoro modifications; (viii) the dsRNA comprises a duplex region of 12-40 nucleotide pairs in length; (ix) a blunt end at 5′end of the antisense strand; (x) the sense strand comprises 1, 2, 3, 4, 5, 6, 7, 8, 9 or 10 LNA modifications, wherein the destabilizing modification is selected from mUNA and GNA building blocks described in Examples 1-3 herein. In some embodiments, the destabilizing modification is selected from the group consisting of GNA-isoC, GNA-isoG, 5′-mUNA, 4′-mUNA, 3′-mUNA, and 2′-mUNA. In some further embodiments of this, the dsRNA molecule further comprises at least one thermally destabilizing modification selected from the group consisting of GNA, 2′-OMe, 3′-OMe, 5′-Me, Hy p-spacer, SNA, hGNA, hhGNA, mGNA, TNA and h′GNA (Mod A-Mod K).

[0224] In some embodiments, the invention provides a dsRNA molecule capable of inhibiting the expression of a target gene, comprising a sense strand and an antisense strand, each strand having 14 to 40 nucleotides, wherein the antisense strand has sufficient complementarity to the target sequence to mediate RNA interference and wherein the antisense strand comprises at least one thermally destabilizing modification of the duplex within the seed region (i.e., at position 2-9 of the 5′-end of the antisense strand, counting from the 5′-end), and the dsRNA further has at least one (e.g., one, two, three, four, five, six seven, eight, nine or all ten) of the following characteristics: (i) a melting temperature (Tₘ) of from about 40° C. to about 80° C.; (ii) the antisense comprises 2, 3, 4, 5, 6, 7, 8, 9, or 10 2′-fluoro modifications; (iii) the antisense comprises 1, 2, 3, 4 or 5 phosphorothioate internucleotide linkages; (iv) the sense strand is conjugated with a ligand; (v) the sense strand comprises 2, 3, 4 or 5 2′-fluoro modifications; (vi) the sense strand comprises 1, 2, 3, 4 or 5 phosphorothioate internucleotide linkages; (vii) the dsRNA comprises at least four 2′-fluoro modifications; (viii) the dsRNA comprises a duplex region of 12-40 nucleotide pairs in length; (ix) a blunt end at 5′end of the antisense strand; and (x) the sense strand comprises 1, 2, 3, 4, 5, 6, 7, 8, 9 or 10 LNA modifications, and wherein no 2′-fluoro modification is present at positions 3-9 (counting from 5′-end) of the antisense strand, wherein the destabilizing modification is selected from mUNA and GNA building blocks described in Examples 1-3 herein. In some embodiments, the destabilizing modification is selected from the group consisting of GNA-isoC, GNA-isoG, 5′-mUNA, 4′-mUNA, 3′-mUNA, and 2′-mUNA. In some further embodiments of this, the dsRNA molecule further comprises at least one thermally destabilizing modification selected from the group consisting of GNA, 2′-OMe, 3′-OMe, 5′-Me, Hy p-spacer, SNA, hGNA, hhGNA, mGNA, TNA and h′GNA (Mod A-Mod K).

[0225] In some embodiments, the dsRNA molecule comprises a sense strand and an antisense strand, each strand having 14 to 40 nucleotides, wherein the antisense strand has sufficient complementarity to the target sequence to mediate RNA interference and wherein the antisense strand comprises at least one thermally destabilizing modification of the duplex within the seed region (i.e., at position 2-9 of the 5′-end of the antisense strand, counting from the 5′-end), wherein the dsRNA has a melting temperature of about 40° C. to about 80° C., and the antisense strand further comprises one or both of the following characteristics: (i) 2, 3, 4, 5, 6, 7, 8, 9 or 10 2′-fluoro modifications, wherein the antisense does not have a 2′-fluoro modification at positions 3-9 (counting from 5′-end); and (ii) 1, 2, 3, 4 or 5 phosphorothioate internucleotide linkages; and the sense strand comprises one, two, three of four of the following characteristics: (i) a ligand conjugated with the sense strand; (ii) 2, 3, 4 or 5 2′-fluoro modifications; (iii) 1, 2, 3, 4 or 5 phosphorothioate internucleotide linkages; and (iv) 1, 2, 3, 4, 5, 6, 7, 8, 9 or 10 LNA modifications, wherein the destabilizing modification is selected from mUNA and GNA building blocks described in Examples 1-3 herein. In some embodiments, the destabilizing modification is selected from the group consisting of GNA-isoC, GNA-isoG, 5′-mUNA, 4′-mUNA, 3′-mUNA, and 2′-mUNA. In some further embodiments of this, the dsRNA molecule further comprises at least one thermally destabilizing modification selected from the group consisting of GNA, 2′-OMe, 3′-OMe, 5′-Me, Hy p-spacer, SNA, hGNA, hhGNA, mGNA, TNA and h′GNA (Mod A-Mod K). In some embodiments, the melting temperature of about 40° C. to about 80° C. is optional.

[0226] In some embodiments, the dsRNA molecule comprises a sense strand and an antisense strand, each strand having 14 to 40 nucleotides, wherein the antisense strand has sufficient complementarity to the target sequence to mediate RNA interference and wherein the antisense strand comprises at least one thermally destabilizing modification of the duplex within the seed region (i.e., at position 2-9 of the 5′-end of the antisense strand, counting from the 5′-end), wherein the dsRNA has a melting temperature of about 40° C. to about 80° C., and the antisense strand further comprises: (i) 2, 3, 4, 5, 6, 7, 8, 9 or 10 2′-fluoro modifications; and (ii) 1, 2, 3, 4 or 5 phosphorothioate internucleotide linkages; and the sense strand comprises: 1, 2, 3, 4, 5, 6, 7, 8, 9 or 10 LNA modifications, and wherein the sense strand optionally comprises one, two or three of the following characteristics: (i) a ligand conjugated with the sense strand; (ii) 2, 3, 4 or 5 2′-fluoro modifications; (iii) 1, 2, 3, 4 or 5 phosphorothioate internucleotide linkages; and (iv) 1, 2, 3, 4, 5, 6, 7, 8, 9 or 10 LNA modifications, wherein the destabilizing modification is selected from mUNA and GNA building blocks described in Examples 1-3 herein. In some embodiments, the destabilizing modification is selected from the group consisting of GNA-isoC, GNA-isoG, 5′-mUNA, 4′-mUNA, 3′-mUNA, and 2′-mUNA. In some further embodiments of this, the dsRNA molecule further comprises at least one thermally destabilizing modification selected from the group consisting of GNA, 2′-OMe, 3′-OMe, 5′-Me, Hy p-spacer, SNA, hGNA, hhGNA, mGNA, TNA and h′GNA (Mod A-Mod K). In some embodiments, the melting temperature of about 40° C. to about 80° C. is optional.

[0227] In some embodiments, the dsRNA molecule comprises a sense strand and an antisense strand, each strand having 14 to 40 nucleotides, wherein the antisense strand has sufficient complementarity to the target sequence to mediate RNA interference and wherein the antisense strand comprises at least one thermally destabilizing modification of the duplex within the seed region (i.e., at position 2-9 of the 5′-end of the antisense strand, counting from the 5′-end), wherein the dsRNA has a melting temperature of about 40° C. to about 80° C., and the antisense strand further comprises 1, 2, 3 or 4 phosphorothioate internucleotide linkages, wherein the antisense strand optionally comprises 2, 3, 4, 5, 6, 7, 8, 9 or 10 2′-fluoro modifications; and the sense strand comprises 1, 2, 3, 4, 5, 6, 7, 8, 9 or 10 LNA modifications, and wherein the sense strand optionally comprises a ligand conjugated with the sense strand, 2, 3, 4 or 5 2′-fluoro modifications; and/or 1, 2, 3, 4 or 5 phosphorothioate internucleotide linkages, wherein the destabilizing modification is selected from mUNA and GNA building blocks described in Examples 1-3 herein. In some embodiments, the destabilizing modification is selected from the group consisting of GNA-isoC, GNA-isoG, 5′-mUNA, 4′-mUNA, 3′-mUNA, and 2′-mUNA. In some further embodiments of this, the dsRNA molecule further comprises at least one thermally destabilizing modification selected from the group consisting of GNA, 2′-OMe, 3′-OMe, 5′-Me, Hy p-spacer, SNA, hGNA, hhGNA, mGNA, TNA and h′GNA (Mod A-Mod K). In some embodiments, the melting temperature of about 40° C. to about 80° C. is optional.

[0228] In some embodiments, the dsRNA molecule comprises a sense strand and an antisense strand, each strand having 14 to 40 nucleotides, wherein the antisense strand has sufficient complementarity to the target sequence to mediate RNA interference and wherein the antisense strand comprises at least one thermally destabilizing modification of the duplex within the seed region (i.e., at position 2-9 of the 5′-end of the antisense strand, counting from the 5′-end), wherein the dsRNA has a melting temperature of about 40° C. to about 80° C., and the antisense strand further comprises 1, 2, 3 or 4 phosphorothioate internucleotide linkages, wherein the antisense strand optionally comprises 2, 3, 4, 5, 6, 7, 8, 9 or 10 2′-fluoro modifications, provided that no 2′-fluoro modification is present at positions 3-9 (counting from 5′-end); and the sense strand comprises 1, 2, 3, 4, 5, 6, 7, 8, 9 or 10 LNA modifications, and wherein the sense strand optionally comprises a ligand conjugated with the sense strand, 2, 3, 4 or 5 2′-fluoro modifications; and/or 1, 2, 3, 4 or 5phosphorothioate internucleotide linkages, wherein the destabilizing modification is selected from mUNA and GNA building blocks described in Examples 1-3 herein. In some embodiments, the destabilizing modification is selected from the group consisting of GNA-isoC, GNA-isoG, 5′-mUNA, 4′-mUNA, 3′-mUNA, and 2′-mUNA. In some further embodiments of this, the dsRNA molecule further comprises at least one thermally destabilizing modification selected from the group consisting of GNA, 2′-OMe, 3′-OMe, 5′-Me, Hy p-spacer, SNA, hGNA, hhGNA, mGNA, TNA and h′GNA (Mod A-Mod K). In some embodiments, the melting temperature of about 40° C. to about 80° C. is optional.

[0229] In some embodiments, the dsRNA molecule comprises a sense strand and an antisense strand, each strand having 14 to 40 nucleotides, wherein the antisense strand has sufficient complementarity to the target sequence to mediate RNA interference and wherein the antisense strand comprises at least one thermally destabilizing modification of the duplex within the first 9 nucleotide positions counting from the 5′-end, a ligand is conjugated with the sense strand, and the dsRNA comprises at least four 2′-fluoro modifications, and wherein no 2′-fluoro modification is present at positions 3-9 of the antisense strand (counting from 5′-end), wherein the destabilizing modification is selected from mUNA and GNA building blocks described in Examples 1-3 herein. In some embodiments, the destabilizing modification is selected from the group consisting of GNA-isoC, GNA-isoG, 5′-mUNA, 4′-mUNA, 3′-mUNA, and 2′-mUNA. In some further embodiments of this, the dsRNA molecule further comprises at least one thermally destabilizing modification selected from the group consisting of GNA, 2′-OMe, 3′-OMe, 5′-Me, Hy p-spacer, SNA, hGNA, hhGNA, mGNA, TNA and h′GNA (Mod A-Mod K).

[0230] In some embodiments, the dsRNA molecule comprises a sense strand and an antisense strand, each strand having 14 to 40 nucleotides, wherein the antisense strand has sufficient complementarity to the target sequence to mediate RNA interference, wherein the dsRNA comprises at least four 2′-fluoro, wherein said antisense strand comprises at least one thermally destabilizing modification of the duplex within the first 9 nucleotide positions, counting from the 5′-end, said sense strand comprises a ligand, wherein the dsRNA has a melting temperature of about 40° C. to about 80° C., and wherein no 2′-fluoro modification is present at positions 3-9 of the antisense strand (counting from 5′-end), wherein the destabilizing modification is selected from mUNA and GNA building blocks described in Examples 1-3 herein. In some embodiments, the destabilizing modification is selected from the group consisting of GNA-isoC, GNA-isoG, 5′-mUNA, 4′-mUNA, 3′-mUNA, and 2′-mUNA. In some further embodiments of this, the dsRNA molecule further comprises at least one thermally destabilizing modification selected from the group consisting of GNA, 2′-OMe, 3′-OMe, 5′-Me, Hy p-spacer, SNA, hGNA, hhGNA, mGNA, TNA and h′GNA (Mod A-Mod K). In some further embodiments of this, the ligand is an ASGPR ligand. In some embodiments, the melting temperature of about 40° C. to about 80° C. is optional

[0231] In some embodiments, the dsRNA molecule comprises a sense strand and an antisense strand, each strand having 14 to 40 nucleotides, wherein the antisense strand has sufficient complementarity to the target sequence to mediate RNA interference, wherein said antisense strand comprises at least one thermally destabilizing modification of the duplex located in position 4-8, counting from the 5′-end, wherein said sense strand comprises a ligand, wherein each of the sense and antisense strands comprise at least two 2′-fluoro modifications, wherein the dsRNA has a melting temperature of about 40° C. to about 80° C., and wherein no 2′-fluoro modification is present at positions 3-9 of the antisense strand (counting from 5′-end), wherein the destabilizing modification is selected from mUNA and GNA building blocks described in Examples 1-3 herein. In some embodiments, the destabilizing modification is selected from the group consisting of GNA-isoC, GNA-isoG, 5′-mUNA, 4′-mUNA, 3′-mUNA, and 2′-mUNA. In some further embodiments of this, the dsRNA molecule further comprises at least one thermally destabilizing modification selected from the group consisting of GNA, 2′-OMe, 3′-OMe, 5′-Me, Hy p-spacer, SNA, hGNA, hhGNA, mGNA, TNA and h′GNA (Mod A-Mod K). In some further embodiments of this, the ligand is an ASGPR ligand. In some embodiments, the melting temperature of about 40° C. to about 80° C. is optional.

[0232] In some embodiments, the dsRNA molecule comprises a sense strand and an antisense strand, each strand having 14 to 40 nucleotides, wherein the antisense strand has sufficient complementarity to the target sequence to mediate RNA interference, wherein the dsRNA comprises at least four 2′-fluoro, wherein said antisense strand comprises at least one thermally destabilizing modification of the duplex within the first 9 nucleotide positions, counting from the 5′-end, and wherein said sense strand comprises a ligand, wherein the dsRNA has a melting temperature of about 40° C. to about 80° C., and wherein the antisense further comprises at least two of the following characteristics: (i) the thermally destabilizing modification of the duplex is located in position 4 to 8 of the antisense strand; (ii) at least two 2′-fluoro modifications; (iii) phosphorothioate internucleotide linkages between nucleotide positions 1 and 2 (counting from the 5′ end); and (iv) antisense strand has a length of 18 to 35 nucleotides, and wherein no 2′-fluoro modification is present at positions 3-9 of the antisense strand (counting from 5′-end), wherein the destabilizing modification is selected from mUNA and GNA building blocks described in Examples 1-3 herein. In some embodiments, the destabilizing modification is selected from the group consisting of GNA-isoC, GNA-isoG, 5′-mUNA, 4′-mUNA, 3′-mUNA, and 2′-mUNA. In some further embodiments of this, the dsRNA molecule further comprises at least one thermally destabilizing modification selected from the group consisting of GNA, 2′-OMe, 3′-OMe, 5′-Me, Hy p-spacer, SNA, hGNA, hhGNA, mGNA, TNA and h′GNA (Mod A-Mod K). In some further embodiments the ligand is an ASGPR ligand. In some embodiments, the melting temperature of about 40° C. to about 80° C. is optional.

[0233] In some embodiments, the dsRNA molecule comprises a sense strand and an antisense strand, each strand having 14 to 40 nucleotides, wherein the antisense strand has sufficient complementarity to the target sequence to mediate RNA interference, wherein the dsRNA comprises at least four 2′-fluoro, wherein said antisense strand comprises at least one thermally destabilizing modification of the duplex within the first 9 nucleotide positions, counting from the 5′-end, and wherein said sense strand comprises a ligand, wherein the dsRNA has a melting temperature of about 40° C. to about 80° C., and the sense strand has at least one of the following characteristics: (i) the ligand is attached to either end of the sense strand; (ii) sense strand comprises at least two 2′-fluoro modifications; (iii) sense strand comprises 1, 2, 3, 4, 5, 6, 78, 9 or 10 LNA modifications; and (iv) the sense strand and the antisense strand show sufficient complementarity to form a double stranded region spanning at least 19 nucleotide positions, wherein the thermally destabilizing modification of the duplex is located within said double-stranded region, and wherein no 2′-fluoro modification is present at positions 3-9 of the antisense strand (counting from 5′-end), wherein the destabilizing modification is selected from mUNA and GNA building blocks described in Examples 1-3 herein. In some embodiments, the destabilizing modification is selected from the group consisting of GNA-isoC, GNA-isoG, 5′-mUNA, 4′-mUNA, 3′-mUNA, and 2′-mUNA. In some further embodiments of this, the dsRNA molecule further comprises at least one thermally destabilizing modification selected from the group consisting of GNA, 2′-OMe, 3′-OMe, 5′-Me, Hy p-spacer, SNA, hGNA, hhGNA, mGNA, TNA and h′GNA (Mod A-Mod K). In some embodiments, the melting temperature of about 40° C. to about 80° C. is optional

[0234] In some embodiments, the dsRNA molecule comprises a sense strand and an antisense strand, each strand having 14 to 40 nucleotides, wherein the antisense strand has sufficient complementarity to the target sequence to mediate RNA interference, wherein said antisense strand comprises at least one thermally destabilizing modification of the duplex located in position 4-8, counting from the 5′-end, wherein said sense strand comprises a ligand and optionally at least one LNA modification, and wherein each of the sense and antisense strands comprise at least two 2′-fluoro modifications, wherein no 2′-fluoro modification is present at positions 3-9 of the antisense strand (counting from 5′-end), wherein the dsRNA has a melting temperature of about 40° C. to about 80° C., and wherein the destabilizing modification is selected from mUNA and GNA building blocks described in Examples 1-3 herein. In some embodiments, the destabilizing modification is selected from the group consisting of GNA-isoC, GNA-isoG, 5′-mUNA, 4′-mUNA, 3′-mUNA, and 2′-mUNA. In some further embodiments of this, the dsRNA molecule further comprises at least one thermally destabilizing modification selected from the group consisting of GNA, 2′-OMe, 3′-OMe, 5′-Me, Hy p-spacer, SNA, hGNA, hhGNA, mGNA, TNA and h′GNA (Mod A-Mod K). In some embodiments, the melting temperature of about 40° C. to about 80° C. is optional

[0235] In some embodiments, the dsRNA molecule comprises a sense strand and an antisense strand, each strand having 14 to 40 nucleotides, wherein the antisense strand has sufficient complementarity to the target sequence to mediate RNA interference, wherein the dsRNA comprises at least four 2′-fluoro, wherein said antisense strand comprises at least one thermally destabilizing modification of the duplex located at position 5, 6 or 7, counting from the 5′-end of the antisense strand, wherein no 2′-fluoro modification is present at positions 3-9 of the antisense strand (counting from 5′-end), wherein said sense strand comprises a ligand and optionally at least one LNA modification, and wherein the dsRNA has a melting temperature of about 40° C. to about 80° C., wherein the destabilizing modification is selected from mUNA and GNA building blocks described in Examples 1-3 herein. In some embodiments, the destabilizing modification is selected from the group consisting of GNA-isoC, GNA-isoG, 5′-mUNA, 4′-mUNA, 3′-mUNA, and 2′-mUNA. In some further embodiments of this, the dsRNA molecule further comprises at least one thermally destabilizing modification selected from the group consisting of GNA, 2′-OMe, 3′-OMe, 5′-Me, Hy p-spacer, SNA, hGNA, hhGNA, mGNA, TNA and h′GNA (Mod A-Mod K).

[0236] In some embodiments, the dsRNA molecule comprises a sense strand and an antisense strand, each strand having 14 to 40 nucleotides, wherein the antisense strand has sufficient complementarity to the target sequence to mediate RNA interference, wherein said antisense strand comprises at least one thermally destabilizing modification of the duplex located at position 5, 6 or 7, counting from the 5′-end, wherein said sense strand comprises a ligand and optionally at least one LNA modification, and wherein each of the sense and antisense strands comprise at least two 2′-fluoro modifications, wherein no 2′-fluoro modification is present at positions 3-9 of the antisense strand (counting from 5′-end), wherein the dsRNA has a melting temperature of about 40° C. to about 80° C., and wherein the destabilizing modification is selected from mUNA and GNA building blocks described in Examples 1-3 herein. In some embodiments, the destabilizing modification is selected from the group consisting of GNA-isoC, GNA-isoG, 5′-mUNA, 4′-mUNA, 3′-mUNA, and 2′-mUNA. In some further embodiments of this, the dsRNA molecule further comprises at least one thermally destabilizing modification selected from the group consisting of GNA, 2′-OMe, 3′-OMe, 5′-Me, Hy p-spacer, SNA, hGNA, hhGNA, mGNA, TNA and h′GNA (Mod A-Mod K). In some embodiments, the melting temperature of about 40° C. to about 80° C. is optional

[0237] In some embodiments, the dsRNA molecule comprises a sense strand and an antisense strand, each strand having 14 to 40 nucleotides, wherein the antisense strand has sufficient complementarity to the target sequence to mediate RNA interference, wherein the dsRNA comprises at least four 2′-fluoro, wherein said antisense strand comprises at least one thermally destabilizing modification of the duplex within the first 9 nucleotide positions, counting from the 5′-end, wherein said sense strand comprises a ligand and optionally at least one LNA modification, wherein no 2′-fluoro modification is present at positions 3-9 of the antisense strand (counting from 5′-end), wherein the dsRNA has a melting temperature of about 40° C. to about 80° C., and wherein the ligand comprises one or more GalNAc derivatives attached through a bivalent or trivalent branched linker, wherein the destabilizing modification is selected from mUNA and GNA building blocks described in Examples 1-3 herein. In some embodiments, the destabilizing modification is selected from the group consisting of GNA-isoC, GNA-isoG, 5′-mUNA, 4′-mUNA, 3′-mUNA, and 2′-mUNA. In some further embodiments of this, the dsRNA molecule further comprises at least one thermally destabilizing modification selected from the group consisting of GNA, 2′-OMe, 3′-OMe, 5′-Me, Hy p-spacer, SNA, hGNA, hhGNA, mGNA, TNA and h′GNA (Mod A-Mod K).

[0238] In some embodiments, the dsRNA molecule comprises a sense strand and an antisense strand, each strand having 14 to 40 nucleotides, wherein the antisense strand has sufficient complementarity to the target sequence to mediate RNA interference, wherein the dsRNA comprises at least four 2′-fluoro, wherein said antisense strand comprises at least one thermally destabilizing modification of the duplex within the first 9 nucleotide positions, counting from the 5′-end, and wherein said sense strand comprises a ligand and optionally at least one LNA modification, wherein no 2′-fluoro modification is present at positions 3-9 of the antisense strand (counting from 5′-end), wherein the dsRNA has a melting temperature of about 40° C. to about 80° C., and wherein the ligand is an ASGPR ligand of structure:

[chemical structure]

wherein the destabilizing modification is selected from mUNA and GNA building blocks described in Examples 1-3 herein. In some embodiments, the destabilizing modification is selected from the group consisting of GNA-isoC, GNA-isoG, 5′-mUNA, 4′-mUNA, 3′-mUNA, and 2′-mUNA. In some further embodiments of this, the dsRNA molecule further comprises at least one thermally destabilizing modification selected from the group consisting of GNA, 2′-OMe, 3′-OMe, 5′-Me, Hy p-spacer, SNA, hGNA, hhGNA, mGNA, TNA and h′GNA (Mod A-Mod K).

[0239] In some embodiments, the sense and antisense strands are independently 19, 20, 21, 22, 23, 24 or 25 nucleotides in length; the antisense strand contains at least one thermally destabilizing nucleotide, where the at least one thermally destabilizing nucleotide is in the seed region of the antisense strand (i.e., at position 2-9 of the 5′-end of the antisense strand); wherein the sense strand is conjugated with a ligand and optionally comprises at least one LNA modification, comprises 3 or 4 2′-fluoro modifications, and comprises 0, 1, 2 or 3 phosphorothioate internucleotide linkages; wherein the antisense strand comprises 3, 4, 5 or 6 2′-fluoro modifications, provided that no 2′-modification is present at positions 3-9 of the antisense strand (counting from 5′-end), comprises 2, 3, 4 or 5 phosphorothioate internucleotide linkages; wherein the dsRNA has a melting temperature of about 40° C. to about 80° C.; and wherein the dsRNA optionally further has at least one (e.g., one, two or all three) of the following characteristics: (i) the dsRNA comprises a duplex region of 12-25 nucleotide pairs in length; (ii) the dsRNA comprises a blunt end at 5′-end of the antisense strand; and (iii) the dsRNA has at least a two nucleotide overhang at the 3′-end of the antisense strand, wherein the destabilizing modification is selected from mUNA and GNA building blocks described in Examples 1-3 herein. In some embodiments, the destabilizing modification is selected from the group consisting of GNA-isoC, GNA-isoG, 5′-mUNA, 4′-mUNA, 3′-mUNA, and 2′-mUNA. In some further embodiments of this, the dsRNA molecule further comprises at least one thermally destabilizing modification selected from the group consisting of GNA, 2′-OMe, 3′-OMe, 5′-Me, Hy p-spacer, SNA, hGNA, hhGNA, mGNA, TNA and h′GNA (Mod A-Mod K). In some embodiments, the melting temperature of about 40° C. to about 80° C. is optional.

[0240] In some embodiments, the sense and antisense strands are independently 19, 20, 21, 22, 23, 24 or 25 nucleotides in length; the antisense strand contains at least one thermally destabilizing nucleotide, where the at least one thermally destabilizing nucleotide is in the seed region of the antisense strand (i.e., at position 2-9 of the 5′-end of the antisense strand); wherein the sense strand is conjugated with a ligand, comprises 2′-fluoro modifications at positions 7, 10 and 11 or at positions 7, 9, 10 and 11 (counting from 5′-end of the sense strand), and optionally comprises phosphorothioate internucleotide linkages between nucleotide positions 1 and 2, and between nucleotide positions 2 and 3, and optionally comprises at least one LNA modification; wherein the antisense strand comprises 3, 4, 5 or 6 2′-fluoro modifications, provided that no 2′-modification is present at positions 3-9 of the antisense strand (counting from 5′-end), comprises 2, 3, 4 or 5 phosphorothioate internucleotide linkages; wherein the dsRNA has a melting temperature of about 40° C. to about 80° C.; and wherein the dsRNA optionally further has at least one (e.g., one, two or all three) of the following characteristics: (i) the dsRNA comprises a duplex region of 12-25 nucleotide pairs in length; (ii) the dsRNA comprises a blunt end at 5′-end of the antisense strand; and (iii) the dsRNA has at least a two nucleotide overhang at the 3′-end of the antisense strand, wherein the destabilizing modification is selected from mUNA and GNA building blocks described in Examples 1-3 herein. In some embodiments, the destabilizing modification is selected from the group consisting of GNA-isoC, GNA-isoG, 5′-mUNA, 4′-mUNA, 3′-mUNA, and 2′-mUNA. In some further embodiments of this, the dsRNA molecule further comprises at least one thermally destabilizing modification selected from the group consisting of GNA, 2′-OMe, 3′-OMe, 5′-Me, Hy p-spacer, SNA, hGNA, hhGNA, mGNA, TNA and h′GNA (Mod A-Mod K). In some embodiments, the melting temperature of about 40° C. to about 80° C. is optional.

[0241] In some embodiments, the sense and antisense strands are independently 19, 20, 21, 22, 23, 24 or 25 nucleotides in length; the antisense strand contains at least one thermally destabilizing nucleotide, where the at least one thermally destabilizing nucleotide is in the seed region of the antisense strand (i.e., at position 2-9 of the 5′-end of the antisense strand); wherein the sense strand is conjugated with a ligand, comprises 3 or 4 2′-fluoro modifications, comprises 0, 1, 2 or 3 phosphorothioate internucleotide linkages, and optionally comprises at least one LNA modification; wherein the antisense strand comprises 2′-fluoro modifications at positions 2, 14 or 16; and the antisense comprises phosphorothioate internucleotide linkages between nucleotide positions 21 and 22, and between nucleotide positions 22 and 23; wherein the dsRNA has a melting temperature of about 40° C. to about 80° C.; and wherein the dsRNA optionally further has at least one (e.g., one, two or all three) of the following characteristics: (i) the dsRNA comprises a duplex region of 12-25 nucleotide pairs in length; (ii) the dsRNA comprises a blunt end at 5′-end of the antisense strand; and (iii) the dsRNA has at least a two nucleotide overhang at the 3′-end of the antisense strand, wherein the destabilizing modification is selected from mUNA and GNA building blocks described in Examples 1-3 herein. In some embodiments, the destabilizing modification is selected from the group consisting of GNA-isoC, GNA-isoG, 5′-mUNA, 4′-mUNA, 3′-mUNA, and 2′-mUNA. In some further embodiments of this, the dsRNA molecule further comprises at least one thermally destabilizing modification selected from the group consisting of GNA, 2′-OMe, 3′-OMe, 5′-Me, Hy p-spacer, SNA, hGNA, hhGNA, mGNA, TNA and h′GNA (Mod A-Mod K). In some embodiments, the melting temperature of about 40° C. to about 80° C. is optional.

[0242] In some embodiments, the sense and antisense strands are independently 19, 20, 21, 22, 23, 24 or 25 nucleotides in length; the antisense strand contains at least one thermally destabilizing nucleotide, where the at least one thermally destabilizing nucleotide is in the seed region of the antisense strand (i.e., at position 2-9 of the 5′-end of the antisense strand); wherein the sense strand is conjugated with a ligand, comprises 3 or 4 2′-fluoro modifications, comprises at least one LNA modification, and optionally comprises 0, 1, 2 or 3 phosphorothioate internucleotide linkages; wherein the antisense strand comprises 2′-fluoro modifications at positions 2, 14 or 16; and the antisense comprises phosphorothioate internucleotide linkages between nucleotide positions 21 and 22, and between nucleotide positions 22 and 23; wherein the dsRNA has a melting temperature of about 40° C. to about 80° C.; and wherein the dsRNA optionally further has at least one (e.g., one, two or all three) of the following characteristics: (i) the dsRNA comprises a duplex region of 12-25 nucleotide pairs in length; (ii) the dsRNA comprises a blunt end at 5′-end of the antisense strand; and (iii) the dsRNA has at least a two nucleotide overhang at the 3′-end of the antisense strand, wherein the destabilizing modification is selected from mUNA and GNA building blocks described in Examples 1-3 herein. In some embodiments, the destabilizing modification is selected from the group consisting of GNA-isoC, GNA-isoG, 5′-mUNA, 4′-mUNA, 3′-mUNA, and 2′-mUNA. In some further embodiments of this, the dsRNA molecule further comprises at least one thermally destabilizing modification selected from the group consisting of GNA, 2′-OMe, 3′-OMe, 5′-Me, Hy p-spacer, SNA, hGNA, hhGNA, mGNA, TNA and h′GNA (Mod A-Mod K). In some embodiments, the melting temperature of about 40° C. to about 80° C. is optional

[0243] In some embodiments, the sense and antisense strands are independently 19, 20, 21, 22, 23, 24 or 25 nucleotides in length; the antisense strand contains at least one thermally destabilizing nucleotide, where the at least one thermally destabilizing nucleotide is in the seed region of the antisense strand (i.e., at position 2-9 of the 5′-end of the antisense strand); wherein the sense strand is conjugated with a ligand, comprises 3 or 4 2′-fluoro modifications, and comprises 0, 1, 2, or 3 phosphorothioate internucleotide linkages, and optionally comprises at least one LNA modification; wherein the antisense strand comprises 2′-fluoro modifications at positions 2, 14 or 16; and the antisense comprises phosphorothioate internucleotide linkages between nucleotide positions 21 and 22, between nucleotide positions 22 and 23, between nucleotide positions 1 and 2, between nucleotide positions 2 and 3; wherein the dsRNA has a melting temperature of about 40° C. to about 80° C.; and wherein the dsRNA optionally further has at least one (e.g., one, two or all three) of the following characteristics: (i) the dsRNA comprises a duplex region of 12-25 nucleotide pairs in length; (ii) the dsRNA comprises a blunt end at 5′-end of the antisense strand; and (iii) the dsRNA has at least a two nucleotide overhang at the 3′-end of the antisense strand, wherein the destabilizing modification is selected from mUNA and GNA building blocks described in Examples 1-3 herein. In some embodiments, the destabilizing modification is selected from the group consisting of GNA-isoC, GNA-isoG, 5′-mUNA, 4′-mUNA, 3′-mUNA, and 2′-mUNA. In some further embodiments of this, the dsRNA molecule further comprises at least one thermally destabilizing modification selected from the group consisting of GNA, 2′-OMe, 3′-OMe, 5′-Me, Hy p-spacer, SNA, hGNA, hhGNA, mGNA, TNA and h′GNA (Mod A-Mod K). In some embodiments, the melting temperature of about 40° C. to about 80° C. is optional.

[0244] In some embodiments, the sense and antisense strands are independently 19, 20, 21, 22, 23, 24 or 25 nucleotides in length; the antisense strand contains at least one thermally destabilizing nucleotide, where the at least one thermally destabilizing nucleotide is in the seed region of the antisense strand (i.e., at position 2-9 of the 5′-end of the antisense strand); wherein the sense strand is conjugated with a ligand, comprises 3 or 4 2′-fluoro modifications, comprises 0, 1, 2, or 3 phosphorothioate internucleotide linkages, and comprises at least one LNA modification; wherein the antisense strand comprises 2′-fluoro modifications at positions 2, 14 or 16; and the antisense comprises phosphorothioate internucleotide linkages between nucleotide positions 21 and 22, between nucleotide positions 22 and 23, between nucleotide positions 1 and 2, between nucleotide positions 2 and 3; wherein the dsRNA has a melting temperature of about 40° C. to about 80° C.; and wherein the dsRNA optionally further has at least one (e.g., one, two or all three) of the following characteristics: (i) the dsRNA comprises a duplex region of 12-25 nucleotide pairs in length; (ii) the dsRNA comprises a blunt end at 5′-end of the antisense strand; and (iii) the dsRNA has at least a two nucleotide overhang at the 3′-end of the antisense strand, wherein the destabilizing modification is selected from mUNA and GNA building blocks described in Examples 1-3 herein. In some embodiments, the destabilizing modification is selected from the group consisting of GNA-isoC, GNA-isoG, 5′-mUNA, 4′-mUNA, 3′-mUNA, and 2′-mUNA. In some further embodiments of this, the dsRNA molecule further comprises at least one thermally destabilizing modification selected from the group consisting of GNA, 2′-OMe, 3′-OMe, 5′-Me, Hy p-spacer, SNA, hGNA, hhGNA, mGNA, TNA and h′GNA (Mod A-Mod K). In some embodiments, the melting temperature of about 40° C. to about 80° C. is optional.

[0245] In some embodiments, the sense and antisense strands are independently 19, 20, 21, 22, 23, 24 or 25 nucleotides in length; the antisense strand contains at least one thermally destabilizing nucleotide, where the at least one thermally destabilizing nucleotide is in the seed region of the antisense strand (i.e., at position 2-9 of the 5′-end of the antisense strand); wherein the sense strand is conjugated with a ligand, comprises 2′-fluoro modifications at positions 7, 10 and 11 or at positions 7, 9, 10 and 11 (counting from 5′-end of the sense strand), optionally comprises phosphorothioate internucleotide linkages between nucleotide positions 1 and 2, and between nucleotide positions 2 and 3, and optionally comprises at least one LNA modification; wherein the antisense strand comprises 2′-fluoro modifications at positions 2, 14 or 16; and the antisense comprises phosphorothioate internucleotide linkages between nucleotide positions 21 and 22, and between nucleotide positions 22 and 23; wherein the dsRNA has a melting temperature of about 40° C. to about 80° C.; and wherein the dsRNA optionally further has at least one (e.g., one, two or all three) of the following characteristics: (i) the dsRNA comprises a duplex region of 12-25 nucleotide pairs in length; (ii) the dsRNA comprises a blunt end at 5′-end of the antisense strand; and (iii) the dsRNA has at least a two nucleotide overhang at the 3′-end of the antisense strand, wherein the destabilizing modification is selected from mUNA and GNA building blocks described in Examples 1-3 herein. In some embodiments, the destabilizing modification is selected from the group consisting of GNA-isoC, GNA-isoG, 5′-mUNA, 4′-mUNA, 3′-mUNA, and 2′-mUNA. In some further embodiments of this, the dsRNA molecule further comprises at least one thermally destabilizing modification selected from the group consisting of GNA, 2′-OMe, 3′-OMe, 5′-Me, Hy p-spacer, SNA, hGNA, hhGNA, mGNA, TNA and h′GNA (Mod A-Mod K). In some embodiments, the melting temperature of about 40° C. to about 80° C. is optional.

[0246] In some embodiments, the sense and antisense strands are independently 19, 20, 21, 22, 23, 24 or 25 nucleotides in length; the antisense strand contains at least one thermally destabilizing nucleotide, where the at least one thermally destabilizing nucleotide is in the seed region of the antisense strand (i.e., at position 2-9 of the 5′-end of the antisense strand); wherein the sense strand is conjugated with a ligand, comprises 2′-fluoro modifications at positions 7, 10 and 11 or at positions 7, 9, 10 and 11 (counting from 5′-end of the sense strand), comprises at least one LNA modification, and optionally comprises phosphorothioate internucleotide linkages between nucleotide positions 1 and 2, and between nucleotide positions 2 and 3; wherein the antisense strand comprises 2′-fluoro modifications at positions 2, 14 or 16; and the antisense comprises phosphorothioate internucleotide linkages between nucleotide positions 21 and 22, and between nucleotide positions 22 and 23; wherein the dsRNA has a melting temperature of about 40° C. to about 80° C.; and wherein the dsRNA optionally further has at least one (e.g., one, two or all three) of the following characteristics: (i) the dsRNA comprises a duplex region of 12-25 nucleotide pairs in length; (ii) the dsRNA comprises a blunt end at 5′-end of the antisense strand; and (iii) the dsRNA has at least a two nucleotide overhang at the 3′-end of the antisense strand, wherein the destabilizing modification is selected from mUNA and GNA building blocks described in Examples 1-3 herein. In some embodiments, the destabilizing modification is selected from the group consisting of GNA-isoC, GNA-isoG, 5′-mUNA, 4′-mUNA, 3′-mUNA, and 2′-mUNA. In some further embodiments of this, the dsRNA molecule further comprises at least one thermally destabilizing modification selected from the group consisting of GNA, 2′-OMe, 3′-OMe, 5′-Me, Hy p-spacer, SNA, hGNA, hhGNA, mGNA, TNA and h′GNA (Mod A-Mod K). In some embodiments, the melting temperature of about 40° C. to about 80° C. is optional.

[0247] In some embodiments, the sense and antisense strands are independently 19, 20, 21, 22, 23, 24 or 25 nucleotides in length, wherein the antisense strand contains at least one thermally destabilizing nucleotide, and where the at least one thermally destabilizing nucleotide is in the seed region of the antisense strand (i.e., at position 2-9 of the 5′-end of the antisense strand), wherein the dsRNA has a melting temperature of about 40° C. to about 80° C., and wherein the dsRNA optionally further has at least one (e.g., one, two, three, four, five, six, seven, eight or all nine) of the following characteristics: (i) the antisense comprises 2, 3, 4, 5 or 6 2′-fluoro modifications, provided that no 2′-modification is present at positions 3-9 of the antisense strand (counting from 5′-end); (ii) the antisense comprises 1, 2, 3, 4 or 5 phosphorothioate internucleotide linkages; (iii) the sense strand is conjugated with a ligand; (iv) the sense strand comprises 2, 3, 4 or 5 2′-fluoro modifications; (v) the sense strand comprises 1, 2, 3, 4 or 5 phosphorothioate internucleotide linkages; (vi) the dsRNA comprises at least four 2′-fluoro modifications; (vii) the dsRNA comprises a duplex region of 18, 19, 20, 21, 22, 23, 24 or 24 nucleotide pairs in length; (viii) the dsRNA comprises a blunt end at 5′-end of the sense strand; and (ix) the sense strand comprises 1, 2, 3, 4, 5, 6, 7, 8, 9 1 or 10 LNA modifications, wherein the destabilizing modification is selected from mUNA and GNA building blocks described in Examples 1-3 herein. In some embodiments, the destabilizing modification is selected from the group consisting of GNA-isoC, GNA-isoG, 5′-mUNA, 4′-mUNA, 3′-mUNA, and 2′-mUNA. In some further embodiments of this, the dsRNA molecule further comprises at least one thermally destabilizing modification selected from the group consisting of GNA, 2′-OMe, 3′-OMe, 5′-Me, Hy p-spacer, SNA, hGNA, hhGNA, mGNA, TNA and h′GNA (Mod A-Mod K). In some particular embodiments, sense strand is 19, 20 or 21 or 22 nucleotides in length and the antisense strand is 20, 21 or 22 nucleotides in length. In some embodiments, the melting temperature of about 40° C. to about 80° C. is optional.

[0248] In some embodiments, the sense and antisense strands are independently 19, 20, 21, 22, 23, 24 or 25 nucleotides in length, wherein the antisense strand contains at least one thermally destabilizing nucleotide and 1, 2, 3 or 4 phosphorothioate internucleotide linkages, and where the at least one thermally destabilizing nucleotide is in the seed region of the antisense strand (i.e., at position 2-9 of the 5′-end of the antisense strand), the sense strand comprises 1, 2, 3, 4, 5, 6, 7, 8, 9 or 10 LNA modifications, wherein the dsRNA has a melting temperature of about 40° C. to about 80° C., and wherein the dsRNA optionally further has at least one (e.g., one, two, three, four, five, six or all seven) of the following characteristics: (i) the antisense comprises 2, 3, 4, 5 or 6 2′-fluoro modifications, provided that no 2′-modification is present at positions 3-9 of the antisense strand (counting from 5′-end); (ii) the sense strand is conjugated with a ligand; (iii) the sense strand comprises 2, 3, 4 or 5 2′-fluoro modifications; (iv) the sense strand comprises 1, 2, 3, 4 or 5 phosphorothioate internucleotide linkages; (v) the dsRNA comprises at least four 2′-fluoro modifications; (vi) the dsRNA comprises a duplex region of 18, 19, 20, 21, 22, 23, 24 or 24 nucleotide pairs in length; and (vii) the dsRNA comprises a blunt end at 5′-end of the sense strand, wherein the destabilizing modification is selected from mUNA and GNA building blocks described in Examples 1-3 herein. In some embodiments, the destabilizing modification is selected from the group consisting of GNA-isoC, GNA-isoG, 5′-mUNA, 4′-mUNA, 3′-mUNA, and 2′-mUNA. In some further embodiments of this, the dsRNA molecule further comprises at least one thermally destabilizing modification selected from the group consisting of GNA, 2′-OMe, 3′-OMe, 5′-Me, Hy p-spacer, SNA, hGNA, hhGNA, mGNA, TNA and h′GNA (Mod A-Mod K). In some particular embodiments, sense strand is 19, 20 or 21 or 22 nucleotides in length and the antisense strand is 20, 21 or 22 nucleotides in length. In some embodiments, the melting temperature of about 40° C. to about 80° C. is optional.

[0249] In some embodiments, the sense and antisense strands are independently 19, 20, 21, 22, 23, 24 or 25 nucleotides in length; the antisense strand contains at least one thermally destabilizing nucleotide, where the at least one thermally destabilizing nucleotide is in the seed region of the antisense strand (i.e., at position 2-9 of the 5′-end of the antisense strand); wherein the sense strand is conjugated with a ligand, comprises 2′-fluoro modifications at positions 7, 10 and 11 or at positions 7, 9, 10 and 11 (counting from 5′-end of the sense strand), optionally comprises 1, 2, 3, 4, 5, 6, 7, 8, 9 or 10 LNA modifications, and optionally comprises phosphorothioate internucleotide linkages between nucleotide positions 1 and 2, and between nucleotide positions 2 and 3; wherein the antisense strand comprises 2′-fluoro modifications at positions 2, 9, 14 or 16, or at positions 2, 14 or 16; and the antisense comprises phosphorothioate internucleotide linkages between nucleotide positions 21 and 22, between nucleotide positions 22 and 23, between nucleotide positions 1 and 2, between nucleotide positions 2 and 3; wherein the dsRNA has a melting temperature of about 40° C. to about 80° C.; and wherein the dsRNA optionally further has at least one (e.g., one, two or all three) of the following characteristics: (i) the dsRNA comprises a duplex region of 12-25 nucleotide pairs in length; (ii) the dsRNA comprises a blunt end at 5′-end of the antisense strand; and (iii) the dsRNA has at least a two nucleotide overhang at the 3′-end of the antisense strand, wherein the destabilizing modification is selected from mUNA and GNA building blocks described in Examples 1-3 herein. In some embodiments, the destabilizing modification is selected from the group consisting of GNA-isoC, GNA-isoG, 5′-mUNA, 4′-mUNA, 3′-mUNA, and 2′-mUNA. In some further embodiments of this, the dsRNA molecule further comprises at least one thermally destabilizing modification selected from the group consisting of GNA, 2′-OMe, 3′-OMe, 5′-Me, Hy p-spacer, SNA, hGNA, hhGNA, mGNA, TNA and h′GNA (Mod A-Mod K). In some embodiments, the melting temperature of about 40° C. to about 80° C. is optional.

[0250] In some embodiments, the sense and antisense strands are independently 19, 20, 21, 22, 23, 24 or 25 nucleotides in length; the antisense strand contains at least one thermally destabilizing nucleotide, where the at least one thermally destabilizing nucleotide is in the seed region of the antisense strand (i.e., at position 2-9 of the 5′-end of the antisense strand); wherein the sense strand is conjugated with a ligand, comprises 2′-fluoro modifications at positions 7, 10 and 11 or at positions 7, 9, 10 and 11 (counting from 5′-end of the sense strand), comprises 1, 2, 3, 4, 5, 6, 7, 8, 9 or 10 LAN modifications, and optionally comprises phosphorothioate internucleotide linkages between nucleotide positions 1 and 2, and between nucleotide positions 2 and 3; wherein the antisense strand comprises 2′-fluoro modifications at positions 2, 9, 14 or 16, or at positions 2, 14 or 16; and the antisense comprises phosphorothioate internucleotide linkages between nucleotide positions 21 and 22, between nucleotide positions 22 and 23, between nucleotide positions 1 and 2, between nucleotide positions 2 and 3; wherein the dsRNA has a melting temperature of about 40° C. to about 80° C.; and wherein the dsRNA optionally further has at least one (e.g., one, two or all three) of the following characteristics: (i) the dsRNA comprises a duplex region of 12-25 nucleotide pairs in length; (ii) the dsRNA comprises a blunt end at 5′-end of the antisense strand; and (iii) the dsRNA has at least a two nucleotide overhang at the 3′-end of the antisense strand, wherein the destabilizing modification is selected from mUNA and GNA building blocks described in Examples 1-3 herein. In some embodiments, the destabilizing modification is selected from the group consisting of GNA-isoC, GNA-isoG, 5′-mUNA, 4′-mUNA, 3′-mUNA, and 2′-mUNA. In some further embodiments of this, the dsRNA molecule further comprises at least one thermally destabilizing modification selected from the group consisting of GNA, 2′-OMe, 3′-OMe, 5′-Me, Hy p-spacer, SNA, hGNA, hhGNA, mGNA, TNA and h′GNA (Mod A-Mod K). In some embodiments, the melting temperature of about 40° C. to about 80° C. is optional.

[0251] In some embodiments, one end of the dsRNA is a blunt end and the other end has an overhang, wherein the antisense strand contains at least one thermally destabilizing nucleotide, and where the at least one thermally destabilizing nucleotide is in the seed region of the antisense strand (i.e., at position 2-9 of the 5′-end of the antisense strand), wherein the dsRNA has a melting temperature of about 40° C. to about 80° C., and wherein the dsRNA optionally further has at least one (e.g., one, two, three, four, five, six, seven or all eight) of the following characteristics: (i) the antisense comprises 2, 3, 4, 5 or 6 2′-fluoro modifications, wherein no 2′-fluoro modification is present in positions 3-9 (counting from the 5′-end); (ii) the antisense comprises 1, 2, 3, 4 or 5 phosphorothioate internucleotide linkages; (iii) the sense strand is conjugated with a ligand; (iv) the sense strand comprises 2, 3, 4 or 5 2′-fluoro modifications; (v) the sense strand comprises 1, 2, 3, 4 or 5 phosphorothioate internucleotide linkages; (vi) the dsRNA comprises at least four 2′-fluoro modifications; (vii) the dsRNA comprises a duplex region of 12-40 nucleotide pairs in length; and (vii) the sense strand comprises 1, 2, 3, 4, 5, 6, 7, 8, 9 or 10 LNA modifications, wherein the destabilizing modification is selected from mUNA and GNA building blocks described in Examples 1-3 herein. In some embodiments, the destabilizing modification is selected from the group consisting of GNA-isoC, GNA-isoG, 5′-mUNA, 4′-mUNA, 3′-mUNA, and 2′-mUNA. In some further embodiments of this, the dsRNA molecule further comprises at least one thermally destabilizing modification selected from the group consisting of GNA, 2′-OMe, 3′-OMe, 5′-Me, Hy p-spacer, SNA, hGNA, hhGNA, mGNA, TNA and h′GNA (Mod A-Mod K). In some embodiments, the overhang is on the 3′-end of the antisense strand and the blunt end is at the 5′-end of the antisense strand. In some particular embodiments, the overhang is 2, 3 or 4-nucleotides in length. In some embodiments, the melting temperature of about 40° C. to about 80° C. is optional.

[0252] In some embodiments, the dsRNA molecule has a duplex region of 19, 20, 21, 22 or 23 nucleotide base pairs in length, wherein one end of the dsRNA is a blunt end and the other end has an overhang, wherein the antisense strand contains at least one thermally destabilizing modification of the duplex located in the seed region of the antisense strand (i.e., at position 2-9 of the 5′-end of the antisense strand), wherein the dsRNA has a melting temperature of about 40° C. to about 80° C., and wherein the dsRNA optionally further has at least one (e.g., one, two, three, five, six or all seven) of the following characteristics: (i) the antisense comprises 2, 3, 4, 5 or 6 2′-fluoro modifications, wherein no 2′-fluoro modification is present at positions 3-9 (counting from 5′-end of the antisense strand); (ii) the antisense comprises 1, 2, 3 or 4 phosphorothioate internucleotide linkages; (iii) the sense strand is conjugated with a ligand; (iv) the sense strand comprises 2, 3, 4 or 5 2′-fluoro modifications; (v) the sense strand comprises 1, 2, 3, 4 or 5 phosphorothioate internucleotide linkages; (vi) the dsRNA comprises at least four 2′-fluoro modifications; and (vii) the sense strand comprises 1, 2, 3, 4, 5, 6, 7, 8, 9 or 10 LNA modifications, and optionally the 2 nucleotide overhang is on the 3′-end of the antisense strand and the blunt end is at the 5′-end of the antisense strand, wherein the destabilizing modification is selected from mUNA and GNA building blocks described in Examples 1-3 herein. In some embodiments, the destabilizing modification is selected from the group consisting of GNA-isoC, GNA-isoG, 5′-mUNA, 4′-mUNA, 3′-mUNA, and 2′-mUNA. In some further embodiments of this, the dsRNA molecule further comprises at least one thermally destabilizing modification selected from the group consisting of GNA, 2′-OMe, 3′-OMe, 5′-Me, Hy p-spacer, SNA, hGNA, hhGNA, mGNA, TNA and h′GNA (Mod A-Mod K). In some embodiments, the overhang is on the 3′-end of the antisense strand and the blunt end is at the 5′-end of the antisense strand. In some embodiments, the melting temperature of about 40° C. to about 80° C. is optional.

[0253] In some embodiments, the dsRNA molecule of the invention may also have two blunt ends, at both ends of the dsRNA duplex.

[0254] In some embodiments, the dsRNA has a blunt end at both ends of the duplex, wherein the antisense strand contains at least one thermally destabilizing nucleotide, and where the at least one thermally destabilizing nucleotide is in the seed region of the antisense strand (i.e., at position 2-9 of the 5′-end of the antisense strand), wherein the dsRNA has a melting temperature of about 40° C. to about 80° C., and wherein the dsRNA optionally further has at least one (e.g., one, two, three, four, five, six, seven or all eight) of the following characteristics: (i) the antisense comprises 2, 3, 4, 5 or 6 2′-fluoro modifications, wherein no 2′-fluoro modification is present at positions 3-9 (counting from the 5′-end of the antisense strand); (ii) the antisense comprises 1, 2, 3, 4 or 5 phosphorothioate internucleotide linkages; (iii) the sense strand is conjugated with a ligand; (iv) the sense strand comprises 2, 3, 4 or 5 2′-fluoro modifications; (v) the sense strand comprises 1, 2, 3, 4 or 5 phosphorothioate internucleotide linkages; (vi) the dsRNA comprises at least four 2′-fluoro modifications; (vii) the dsRNA comprises a duplex region of 12-40 nucleotide pairs in length; and (viii) the sense strand comprises at least 1, 2, 3, 4, 5, 6, 7, 8, 9 or 10 LNA modifications, wherein the destabilizing modification is selected from mUNA and GNA building blocks described in Examples 1-3 herein. In some embodiments, the destabilizing modification is selected from the group consisting of GNA-isoC, GNA-isoG, 5′-mUNA, 4′-mUNA, 3′-mUNA, and 2′-mUNA. In some further embodiments of this, the dsRNA molecule further comprises at least one thermally destabilizing modification selected from the group consisting of GNA, 2′-OMe, 3′-OMe, 5′-Me, Hy p-spacer, SNA, hGNA, hhGNA, mGNA, TNA and h′GNA (Mod A-Mod K). In some embodiments, the melting temperature of about 40° C. to about 80° C. is optional.

[0255] In some embodiments, the dsRNA molecule has a duplex region of 19, 20, 21, 22 or 23 nucleotide base pairs in length and has a blunt end at both ends of the duplex, wherein one end of the dsRNA is a blunt end and the other end has an overhang, wherein the antisense strand contains at least one thermally destabilizing modification of the duplex located in the seed region of the antisense strand (i.e., at position 2-9 of the 5′-end of the antisense strand), wherein the dsRNA has a melting temperature of about 40° C. to about 80° C., and wherein the dsRNA optionally further has at least one (e.g., one, two, three, five, six or all seven) of the following characteristics: (i) the antisense comprises 2, 3, 4, 5 or 6 2′-fluoro modifications, wherein no 2′-fluoro modification is present at positions 3-9 (counting from the 5′-end of the antisense strand); (ii) the antisense comprises 1, 2, 3, 4 or 5 phosphorothioate internucleotide linkages; (iii) the sense strand is conjugated with a ligand; (iv) the sense strand comprises 2, 3, 4 or 5 2′-fluoro modifications; (v) the sense strand comprises 1, 2, 3, 4 or 5 phosphorothioate internucleotide linkages; (vi) the dsRNA comprises at least four 2′-fluoro modifications; and (vii) the sense strand comprises at least 1, 2, 3, 4, 5, 6, 7, 8, 9 or 10 LNA modifications, wherein the destabilizing modification is selected from mUNA and GNA building blocks described in Examples 1-3 herein. In some embodiments, the destabilizing modification is selected from the group consisting of GNA-isoC, GNA-isoG, 5′-mUNA, 4′-mUNA, 3′-mUNA, and 2′-mUNA. In some further embodiments of this, the dsRNA molecule further comprises at least one thermally destabilizing modification selected from the group consisting of GNA, 2′-OMe, 3′-OMe, 5′-Me, Hy p-spacer, SNA, hGNA, hhGNA, mGNA, TNA and h′GNA (Mod A-Mod K). In some embodiments, the melting temperature of about 40° C. to about 80° C. is optional.

[0256] In some embodiments, the dsRNA molecule of the invention comprises a 21 nucleotides (nt) sense strand and a 23 nucleotides (nt) antisense, wherein the antisense strand contains at least one thermally destabilizing nucleotide, where the at least one thermally destabilizing nucleotide occurs in the seed region of the antisense strand (i.e., at position 2-9 of the 5′-end of the antisense strand), wherein one end of the dsRNA is blunt, while the other end is comprises a 2 nt overhang, wherein the dsRNA has a melting temperature of about 40° C. to about 80° C., and wherein the dsRNA optionally further has at least one (e.g., one, two, three, four, five, six, seven or all eight) of the following characteristics: (i) the antisense comprises 2, 3, 4, 5 or 6 2′-fluoro modifications, wherein no 2′-fluoro modification is present at positions 3-9 (counting from the 5′-end of the antisense strand); (ii) the antisense comprises 1, 2, 3, 4 or 5 phosphorothioate internucleotide linkages; (iii) the sense strand is conjugated with a ligand; (iv) the sense strand comprises 2, 3, 4 or 5 2′-fluoro modifications; (v) the sense strand comprises 1, 2, 3, 4 or 5 phosphorothioate internucleotide linkages; (vi) the dsRNA comprises at least four 2′-fluoro modifications; (vii) the dsRNA comprises a blunt end at 5′-end of the antisense strand. Preferably, the 2 nt overhang is at the 3′-end of the antisense; and (viii) the sense strand comprises at least 1, 2, 3, 4, 5, 6, 7, 8, 9 or 10 LNA modifications, wherein the destabilizing modification is selected from mUNA and GNA building blocks described in Examples 1-3 herein. In some embodiments, the destabilizing modification is selected from the group consisting of GNA-isoC, GNA-isoG, 5′-mUNA, 4′-mUNA, 3′-mUNA, and 2′-mUNA. In some further embodiments of this, the dsRNA molecule further comprises at least one thermally destabilizing modification selected from the group consisting of GNA, 2′-OMe, 3′-OMe, 5′-Me, Hy p-spacer, SNA, hGNA, hhGNA, mGNA, TNA and h′GNA (Mod A-Mod K). In some embodiments, the melting temperature of about 40° C. to about 80° C. is optional.

[0257] In some embodiments, the dsRNA molecule of the invention comprising a sense and antisense strands, wherein: the sense strand is 25-30 nucleotide residues in length, wherein starting from the 5′ terminal nucleotide (position 1), positions 1 to 23 of said sense strand comprise at least 8 ribonucleotides; antisense strand is 36-66 nucleotide residues in length and, starting from the 3′ terminal nucleotide, at least 8 ribonucleotides in the positions paired with positions 1-23 of sense strand to form a duplex; wherein at least the 3′terminal nucleotide of antisense strand is unpaired with sense strand, and up to 6 consecutive 3′ terminal nucleotides are unpaired with sense strand, thereby forming a 3′ single stranded overhang of 1-6 nucleotides; wherein the 5′ terminus of antisense strand comprises from 10-30 consecutive nucleotides which are unpaired with sense strand, thereby forming a 10-30 nucleotide single stranded 5′ overhang; wherein at least the sense strand 5′ terminal and 3′ terminal nucleotides are base paired with nucleotides of antisense strand when sense and antisense strands are aligned for maximum complementarity, thereby forming a substantially duplexed region between sense and antisense strands; and antisense strand is sufficiently complementary to a target RNA along at least 19 ribonucleotides of antisense strand length to reduce target gene expression when said double stranded nucleic acid is introduced into a mammalian cell; and wherein the antisense strand contains at least one thermally destabilizing nucleotide, where at least one thermally destabilizing nucleotide is in the seed region of the antisense strand (i.e. at position 2-9 of the 5′-end of the antisense strand), and wherein the dsRNA has a melting temperature of about 40° C. to about 80° C., wherein the destabilizing modification is selected from mUNA and GNA building blocks described in Examples 1-3 herein. In some embodiments, the destabilizing modification is selected from the group consisting of GNA-isoC, GNA-isoG, 5′-mUNA, 4′-mUNA, 3′-mUNA, and 2′-mUNA. In some further embodiments of this, the dsRNA molecule further comprises at least one thermally destabilizing modification selected from the group consisting of GNA, 2′-OMe, 3′-OMe, 5′-Me, Hy p-spacer, SNA, hGNA, hhGNA, mGNA, TNA and h′GNA (Mod A-Mod K).

[0258] For example, the thermally destabilizing nucleotide occurs between positions opposite or complimentary to positions 14-17 of the 5′-end of the sense strand, and wherein the dsRNA optionally further has at least one (e.g., one, two, three, four, five, six, seven or all eight) of the following characteristics: (i) the antisense comprises 2, 3, 4, 5 or 6 2′-fluoro modifications, wherein no 2′-fluoro modification is present at positions 3-9 (counting from 5′-end of the antisense strand); (ii) the antisense comprises 1, 2, 3, 4 or 5 phosphorothioate internucleotide linkages; (iii) the sense strand is conjugated with a ligand; (iv) the sense strand comprises 2, 3, 4 or 5 2′-fluoro modifications; (v) the sense strand comprises 1, 2, 3, 4 or 5 phosphorothioate internucleotide linkages; and (vi) the dsRNA comprises at least four 2′-fluoro modifications; (vii) the dsRNA comprises a duplex region of 12-30 nucleotide pairs in length; and the sense strand comprises 1, 2, 3, 4, 5, 6, 7, 8, 9 or 10 LNA modifications, wherein the destabilizing modification is selected from mUNA and GNA building blocks described in Examples 1-3 herein. In some embodiments, the destabilizing modification is selected from the group consisting of GNA-isoC, GNA-isoG, 5′-mUNA, 4′-mUNA, 3′-mUNA, and 2′-mUNA. In some further embodiments of this, the dsRNA molecule further comprises at least one thermally destabilizing modification selected from the group consisting of GNA, 2′-OMe, 3′-OMe, 5′-Me, Hy p-spacer, SNA, hGNA, hhGNA, mGNA, TNA and h′GNA (Mod A-Mod K). In some embodiments, the melting temperature of about 40° C. to about 80° C. is optional.

[0259] In some embodiments, the dsRNA molecule of the invention comprises a sense and antisense strands, wherein said dsRNA molecule comprises a sense strand having a length which is at least 25 and at most 29 nucleotides and an antisense strand having a length which is at most 30 nucleotides with the sense strand comprises a modified nucleotide that is susceptible to enzymatic degradation at position 11 from the 5′end, wherein the 3′ end of said sense strand and the 5′ end of said antisense strand form a blunt end and said antisense strand is 1-4 nucleotides longer at its 3′ end than the sense strand, wherein the duplex region which is at least 25 nucleotides in length, and said antisense strand is sufficiently complementary to a target mRNA along at least 19 nt of said antisense strand length to reduce target gene expression when said dsRNA molecule is introduced into a mammalian cell, and wherein dicer cleavage of said dsRNA preferentially results in an siRNA comprising said 3′ end of said antisense strand, thereby reducing expression of the target gene in the mammal, wherein the antisense strand contains at least one thermally destabilizing nucleotide, where the at least one thermally destabilizing nucleotide is in the seed region of the antisense strand (i.e. at position 2-9 of the 5′-end of the antisense strand), wherein the dsRNA has a melting temperature of about 40° C. to about 80° C., and wherein the dsRNA optionally further has at least one (e.g., one, two, three, four, five, six, seven or all eight) of the following characteristics: (i) the antisense comprises 2, 3, 4, 5 or 6 2′-fluoro modifications, wherein no 2′-fluoro modification is present at positions 3-9 (counting from 5′-end of antisense strand); (ii) the antisense comprises 1, 2, 4 or 5 phosphorothioate internucleotide linkages; (iii) the sense strand is conjugated with a ligand; (iv) the sense strand comprises 2, 3, 4 or 5 2′-fluoro modifications; (v) the sense strand comprises 1, 2, 3, 4 or 5 phosphorothioate internucleotide linkages; and (vi) the dsRNA comprises at least four 2′-fluoro modifications; (vii) the dsRNA has a duplex region of 12-29 nucleotide pairs in length; (viii) and the sense strand comprises 1, 2, 3, 4, 5, 7, 8, 9 or 10 LNA modifications, wherein the destabilizing modification is selected from mUNA and GNA building blocks described in Examples 1-3 herein. In some embodiments, the destabilizing modification is selected from the group consisting of GNA-isoC, GNA-isoG, 5′-mUNA, 4′-mUNA, 3′-mUNA, and 2′-mUNA. In some further embodiments of this, the dsRNA molecule further comprises at least one thermally destabilizing modification selected from the group consisting of GNA, 2′-OMe, 3′-OMe, 5′-Me, Hy p-spacer, SNA, hGNA, hhGNA, mGNA, TNA and h′GNA (Mod A-Mod K). In some embodiments, the melting temperature of about 40° C. to about 80° C. is optional.

[0260] In some embodiments, the antisense strand comprises phosphorothioate internucleotide linkages between nucleotide positions 21 and 22, and between nucleotide positions 22 and 23, wherein the antisense strand contains at least one thermally destabilizing modification of the duplex located in the seed region of the antisense strand (i.e., at position 2-9 of the 5′-end of the antisense strand), wherein the dsRNA has a melting temperature of about 40° C. to about 80° C., and wherein the dsRNA optionally further has at least one (e.g., one, two, three, four, five, six, seven, eight or all nine) of the following characteristics: (i) the antisense comprises 2, 3, 4, 5 or 6 2′-fluoro modifications, wherein no 2′-fluoro modification is present at positions 3-9 (counting from 5′-end of antisense strand); (ii) the antisense comprises 3 or 4 phosphorothioate internucleotide linkages; (iii) the sense strand is conjugated with a ligand; (iv) the sense strand comprises 2, 3, 4 or 5 2′-fluoro modifications; (v) the sense strand comprises 1, 2, 3, 4 or 5 phosphorothioate internucleotide linkages; (vi) the dsRNA comprises at least four 2′-fluoro modifications; (vii) the dsRNA comprises a duplex region of 12-40 nucleotide pairs in length; (viii) the dsRNA has a blunt end at 5′-end of the antisense strand; (ix) and the sense strand comprises 1, 2, 3, 4, 5, 6, 7, 8, 9 or 10 LNA modifications, wherein the destabilizing modification is selected from mUNA and GNA building blocks described in Examples 1-3 herein. In some embodiments, the destabilizing modification is selected from the group consisting of GNA-isoC, GNA-isoG, 5′-mUNA, 4′-mUNA, 3′-mUNA, and 2′-mUNA. In some further embodiments of this, the dsRNA molecule further comprises at least one thermally destabilizing modification selected from the group consisting of GNA, 2′-OMe, 3′-OMe, 5′-Me, Hy p-spacer, SNA, hGNA, hhGNA, mGNA, TNA and h′GNA (Mod A-Mod K). In some embodiments, the melting temperature of about 40° C. to about 80° C. is optional.

[0261] In some embodiments, the antisense strand comprises phosphorothioate internucleotide linkages between nucleotide positions 1 and 2, between nucleotide positions 2 and 3, between nucleotide positions 21 and 22, and between nucleotide positions 22 and 23, wherein the antisense strand contains at least one thermally destabilizing modification of the duplex located in the seed region of the antisense strand (i.e., at position 2-9 of the 5′-end of the antisense strand), wherein the dsRNA has a melting temperature of about 40° C. to about 80° C., and wherein the dsRNA optionally further has at least one (e.g., one, two, three, four, five, six, seven, eight or all nine) of the following characteristics: (i) the antisense comprises 2, 3, 4, 5 or 6 2′-fluoro modifications, wherein no 2′-fluoro modification is present at positions 3-9 (counting from 5′-end of the antisense strand); (ii) the sense strand is conjugated with a ligand; (iii) the sense strand comprises 2, 3, 4 or 5 2′-fluoro modifications; (iv) the sense strand comprises 1, 2, 3, 4 or 5 phosphorothioate internucleotide linkages; (v) the dsRNA comprises at least four 2′-fluoro modifications; (vi) the dsRNA comprises a duplex region of 12-40 nucleotide pairs in length; (vii) the dsRNA comprises a duplex region of 12-40 nucleotide pairs in length; (viii) the dsRNA has a blunt end at 5′-end of the antisense strand; and (ix) and the sense strand comprises 1, 2, 3, 4, 5, 6, 7, 8, 9 or 10 LNA modifications, wherein the destabilizing modification is selected from mUNA and GNA building blocks described in Examples 1-3 herein. In some embodiments, the destabilizing modification is selected from the group consisting of GNA-isoC, GNA-isoG, 5′-mUNA, 4′-mUNA, 3′-mUNA, and 2′-mUNA. In some further embodiments of this, the dsRNA molecule further comprises at least one thermally destabilizing modification selected from the group consisting of GNA, 2′-OMe, 3′-OMe, 5′-Me, Hy p-spacer, SNA, hGNA, hhGNA, mGNA, TNA and h′GNA (Mod A-Mod K). In some embodiments, the melting temperature of about 40° C. to about 80° C. is optional.

[0262] In some embodiments, the sense strand comprises phosphorothioate internucleotide linkages between nucleotide positions 1 and 2, and between nucleotide positions 2 and 3, wherein the antisense strand contains at least one thermally destabilizing modification of the duplex located in the seed region of the antisense strand (i.e., at position 2-9 of the 5′-end of the antisense strand), wherein the dsRNA has a melting temperature of about 40° C. to about 80° C., and wherein the dsRNA optionally further has at least one (e.g., one, two, three, four, five, six, seven, eight or all nine) of the following characteristics: (i) the antisense comprises 2, 3, 4, 5 or 6 2′-fluoro modifications, wherein no 2′-fluoro modification is present at positions 3-9 (counting from 5′-end of the antisense strand); (ii) the antisense comprises 1, 2, 3, 4 or 5 phosphorothioate internucleotide linkages; (iii) the sense strand is conjugated with a ligand; (iv) the sense strand comprises 2, 3, 4 or 5 2′-fluoro modifications; (v) the sense strand comprises 1, 2, 3, 4 or 5 phosphorothioate internucleotide linkages; (vi) the dsRNA comprises at least four 2′-fluoro modifications; (vii) the dsRNA comprises a duplex region of 12-40 nucleotide pairs in length; (viii) the dsRNA has a blunt end at 5′-end of the antisense strand; and (ix) the sense strand comprises 1, 2, 3, 4, 5, 6, 7, 8, 9 or 10 LNA modifications, wherein the destabilizing modification is selected from mUNA and GNA building blocks described in Examples 1-3 herein. In some embodiments, the destabilizing modification is selected from the group consisting of GNA-isoC, GNA-isoG, 5′-mUNA, 4′-mUNA, 3′-mUNA, and 2′-mUNA. In some further embodiments of this, the dsRNA molecule further comprises at least one thermally destabilizing modification selected from the group consisting of GNA, 2′-OMe, 3′-OMe, 5′-Me, Hy p-spacer, SNA, hGNA, hhGNA, mGNA, TNA and h′GNA (Mod A-Mod K). In some embodiments, the melting temperature of about 40° C. to about 80° C. is optional.

[0263] In some embodiments, the sense strand comprises phosphorothioate internucleotide linkages between nucleotide positions 1 and 2, and between nucleotide positions 2 and 3, the antisense strand comprises phosphorothioate internucleotide linkages between nucleotide positions 1 and 2, between nucleotide positions 2 and 3, between nucleotide positions 21 and 22, and between nucleotide positions 22 and 23, wherein the antisense strand contains at least one thermally destabilizing modification of the duplex located in the seed region of the antisense strand (i.e., at position 2-9 of the 5′-end of the antisense strand), wherein the dsRNA has a melting temperature of about 40° C. to about 80° C., and wherein the dsRNA optionally further has at least one (e.g., one, two, three, four, five, six, seven or all eight) of the following characteristics: (i) the antisense comprises 2, 3, 4, 5 or 6 2′-fluoro modifications; (ii) the sense strand is conjugated with a ligand; (iii) the sense strand comprises 2, 3, 4 or 5 2′-fluoro modifications, wherein no 2′-fluoro modification is present at positions 3-9 (counting from 5′-end of the antisense strand); (iv) the sense strand comprises 1, 2, 3, 4 or 5 phosphorothioate internucleotide linkages; (v) the dsRNA comprises at least four 2′-fluoro modifications; (vi) the dsRNA comprises a duplex region of 12-40 nucleotide pairs in length; (vii) the dsRNA has a blunt end at 5′-end of the antisense strand; and (viii) the sense strand comprises 1, 2, 3, 4, 5, 6, 7, 8, 9 or 10 LNA modifications, wherein the destabilizing modification is selected from mUNA and GNA building blocks described in Examples 1-3 herein. In some embodiments, the destabilizing modification is selected from the group consisting of GNA-isoC, GNA-isoG, 5′-mUNA, 4′-mUNA, 3′-mUNA, and 2′-mUNA. In some further embodiments of this, the dsRNA molecule further comprises at least one thermally destabilizing modification selected from the group consisting of GNA, 2′-OMe, 3′-OMe, 5′-Me, Hy p-spacer, SNA, hGNA, hhGNA, mGNA, TNA and h′GNA (Mod A-Mod K). In some embodiments, the melting temperature of about 40° C. to about 80° C. is optional.

[0264] In one aspect the invention provides a dsRNA molecule capable of inhibiting the expression of a target gene, comprising a sense strand and an antisense strand, each strand having 14 to 40 nucleotides, wherein the antisense strand has sufficient complementarity to the target sequence to mediate RNA interference and wherein the antisense strand comprises at least one thermally destabilizing modification of the duplex within the seed region (i.e., at position 2-9 of the 5′-end of the antisense strand, counting from the 5′-end), and the dsRNA further has at least one (e.g., one, two, three, four, five, six seven, eight or all nine) of the following characteristics: (i) the antisense comprises 2, 3, 4, 5 or 6 2′-fluoro modifications, wherein no 2′-fluoro modification is present at positions 3-9 (counting from 5′-end); (ii) the antisense comprises 1, 2, 3, 4 or 5 phosphorothioate internucleotide linkages; (iii) the sense strand is conjugated with a ligand; (iv) the sense strand comprises 2, 3, 4 or 5 2′-fluoro modifications; (v) the sense strand comprises 1, 2, 3, 4 or 5 phosphorothioate internucleotide linkages; (vi) the dsRNA comprises at least four 2′-fluoro modifications; (vii) the dsRNA comprises a duplex region of 12-40 nucleotide pairs in length; (viii) a blunt end at 5′end of the antisense strand; and (ix) the sense strand comprises 1, 2, 3, 4, 5, 6, 7, 8, 9 or 10 LNA modifications, wherein the destabilizing modification is selected from mUNA and GNA building blocks described in Examples 1-3 herein. In some embodiments, the destabilizing modification is selected from the group consisting of GNA-isoC, GNA-isoG, 5′-mUNA, 4′-mUNA, 3′-mUNA, and 2′-mUNA. In some further embodiments of this, the dsRNA molecule further comprises at least one thermally destabilizing modification selected from the group consisting of GNA, 2′-OMe, 3′-OMe, 5′-Me, Hy p-spacer, SNA, hGNA, hhGNA, mGNA, TNA and h′GNA (Mod A-Mod K). In some embodiments, the melting temperature of about 40° C. to about 80° C. is optional.

[0265] In some particular embodiments, the thermally destabilizing modification of the duplex is at position 5, 6 or 7 of the antisense strand, counting from 5′-end of the antisense strand, wherein the destabilizing modification is selected from mUNA and GNA building blocks described in Examples 1-3 herein. In some embodiments, the destabilizing modification is selected from the group consisting of GNA-isoC, GNA-isoG, 5′-mUNA, 4′-mUNA, 3′-mUNA, and 2′-mUNA. In some further embodiments of this, the dsRNA molecule further comprises at least one thermally destabilizing modification selected from the group consisting of GNA, 2′-OMe, 3′-OMe, 5′-Me, Hy p-spacer, SNA, hGNA, hhGNA, mGNA, TNA and h′GNA (Mod A-Mod K).

[0266] In some embodiments, the thermally destabilizing modification of the duplex is at position 2, 3, 4, 8 or 9 of the antisense strand, counting from 5′-end of the antisense strand, wherein the destabilizing modification is selected from mUNA and GNA building blocks described in Examples 1-3 herein. In some embodiments, the destabilizing modification is selected from the group consisting of GNA-isoC, GNA-isoG, 5′-mUNA, 4′-mUNA, 3′-mUNA, and 2′-mUNA. In some further embodiments of this, the dsRNA molecule further comprises at least one thermally destabilizing modification selected from the group consisting of GNA, 2′-OMe, 3′-OMe, 5′-Me, Hy p-spacer, SNA, hGNA, hhGNA, mGNA, TNA and h′GNA (Mod A-Mod K).

[0267] In some embodiments, the dsRNA molecule comprises a sense strand and an antisense strand, each strand having 14 to 40 nucleotides, wherein the antisense strand has sufficient complementarity to the target sequence to mediate RNA interference and wherein the antisense strand comprises at least one thermally destabilizing modification of the duplex within the seed region (i.e., at position 2-9 of the 5′-end of the antisense strand, counting from the 5′-end), and the antisense strand further comprises one or both of the following characteristics: (i) 2, 3, 4, 5 or 6 2′-fluoro modifications, wherein no 2′-modification is present at positions 3-9 (counting from 5′-end of the antisense strand); and (ii) 1, 2, 3, 4 or 5 phosphorothioate internucleotide linkages; and the sense strand comprises one, two, three or four of the following characteristics: (i) a ligand conjugated with the sense strand; (ii) 2, 3, 4 or 5 2′-fluoro modifications; (iii) 1, 2, 3, 4 or 5 phosphorothioate internucleotide linkages; and (iv) 1, 2, 3, 4, 5, 6, 7, 8, 9 or 10 LNA modifications, wherein the destabilizing modification is selected from mUNA and GNA building blocks described in Examples 1-3 herein. In some embodiments, the destabilizing modification is selected from the group consisting of GNA-isoC, GNA-isoG, 5′-mUNA, 4′-mUNA, 3′-mUNA, and 2′-mUNA. In some further embodiments of this, the dsRNA molecule further comprises at least one thermally destabilizing modification selected from the group consisting of GNA, 2′-OMe, 3′-OMe, 5′-Me, Hy p-spacer, SNA, hGNA, hhGNA, mGNA, TNA and h′GNA (Mod A-Mod K).

[0268] In some embodiments, the dsRNA molecule comprises a sense strand and an antisense strand, each strand having 14 to 40 nucleotides, wherein the antisense strand has sufficient complementarity to the target sequence to mediate RNA interference and wherein the antisense strand comprises at least one thermally destabilizing modification of the duplex within the first 9 nucleotide positions counting from the 5′-end, a ligand is conjugated with the sense strand, and the dsRNA comprises at least four 2′-fluoro modifications, and wherein no 2′-modification is present at positions 3-9 of the antisense strand (counting from 5′-end of the antisense strand), wherein the destabilizing modification is selected from mUNA and GNA building blocks described in Examples 1-3 herein. In some embodiments, the destabilizing modification is selected from the group consisting of GNA-isoC, GNA-isoG, 5′-mUNA, 4′-mUNA, 3′-mUNA, and 2′-mUNA. In some further embodiments of this, the dsRNA molecule further comprises at least one thermally destabilizing modification selected from the group consisting of GNA, 2′-OMe, 3′-OMe, 5′-Me, Hy p-spacer, SNA, hGNA, hhGNA, mGNA, TNA and h′GNA (Mod A-Mod K).

[0269] In some embodiments, the dsRNA molecule comprises a sense strand and an antisense strand, each strand having 14 to 40 nucleotides, wherein the antisense strand has sufficient complementarity to the target sequence to mediate RNA interference, wherein the dsRNA comprises at least four 2′-fluoro, wherein said antisense strand comprises at least one thermally destabilizing modification of the duplex within the first 9 nucleotide positions, counting from the 5′-end, and wherein said sense strand comprises a ligand, and wherein no 2′-modification is present at positions 3-9 of the antisense strand (counting from 5′-end of the antisense strand), wherein the destabilizing modification is selected from mUNA and GNA building blocks described in Examples 1-3 herein. In some embodiments, the destabilizing modification is selected from the group consisting of GNA-isoC, GNA-isoG, 5′-mUNA, 4′-mUNA, 3′-mUNA, and 2′-mUNA. In some further embodiments of this, the dsRNA molecule further comprises at least one thermally destabilizing modification selected from the group consisting of GNA, 2′-OMe, 3′-OMe, 5′-Me, Hy p-spacer, SNA, hGNA, hhGNA, mGNA, TNA and h′GNA (Mod A-Mod K). In some further embodiments of this, the ligand is an ASGPR ligand.

[0270] In some embodiments, the dsRNA molecule comprises a sense strand and an antisense strand, each strand having 14 to 40 nucleotides, wherein the antisense strand has sufficient complementarity to the target sequence to mediate RNA interference, wherein said antisense strand comprises at least one thermally destabilizing modification of the duplex located in position 4-8, counting from the 5′-end, wherein said sense strand comprises a ligand, and wherein each of the sense and antisense strands comprise at least two 2′-fluoro modifications, and wherein no 2′-modification is present at positions 3-9 of the antisense strand (counting from 5′-end of the antisense strand), wherein the destabilizing modification is selected from mUNA and GNA building blocks described in Examples 1-3 herein. In some embodiments, the destabilizing modification is selected from the group consisting of GNA-isoC, GNA-isoG, 5′-mUNA, 4′-mUNA, 3′-mUNA, and 2′-mUNA. In some further embodiments of this, the dsRNA molecule further comprises at least one thermally destabilizing modification selected from the group consisting of GNA, 2′-OMe, 3′-OMe, 5′-Me, Hy p-spacer, SNA, hGNA, hhGNA, mGNA, TNA and h′GNA (Mod A-Mod K). In some further embodiments of this, the ligand is an ASGPR ligand.

[0271] In some embodiments, the dsRNA molecule comprises a sense strand and an antisense strand, each strand having 14 to 40 nucleotides, wherein the antisense strand has sufficient complementarity to the target sequence to mediate RNA interference, wherein the dsRNA comprises at least four 2′-fluoro, wherein said antisense strand comprises at least one thermally destabilizing modification of the duplex within the first 9 nucleotide positions, counting from the 5′-end, and wherein said sense strand comprises a ligand, and wherein the antisense further comprises at least two of the following characteristics: (i) the thermally destabilizing modification of the duplex is located in position 4 to 8 of the antisense strand; (ii) at least two 2′-fluoro modifications, and wherein no 2′-modification is present at positions 3-9 of the antisense strand (counting from 5′-end of the antisense strand); (iii) phosphorothioate internucleotide linkages between nucleotide positions 1 and 2 (counting from the 5′ end); and antisense strand has a length of 18 to 35 nucleotides, wherein the destabilizing modification is selected from mUNA and GNA building blocks described in Examples 1-3 herein. In some embodiments, the destabilizing modification is selected from the group consisting of GNA-isoC, GNA-isoG, 5′-mUNA, 4′-mUNA, 3′-mUNA, and 2′-mUNA. In some further embodiments of this, the dsRNA molecule further comprises at least one thermally destabilizing modification selected from the group consisting of GNA, 2′-OMe, 3′-OMe, 5′-Me, Hy p-spacer, SNA, hGNA, hhGNA, mGNA, TNA and h′GNA (Mod A-Mod K). In some further embodiments the ligand is an ASGPR ligand.

[0272] In some embodiments, the dsRNA molecule comprises a sense strand and an antisense strand, each strand having 14 to 40 nucleotides, wherein the antisense strand has sufficient complementarity to the target sequence to mediate RNA interference, wherein the dsRNA comprises at least four 2′-fluoro, wherein said antisense strand comprises at least one thermally destabilizing modification of the duplex within the first 9 nucleotide positions, counting from the 5′-end, and wherein said sense strand comprises a ligand, and the sense strand has at least one of the following characteristics: (i) the ligand is attached to either end of the sense strand; (ii) sense strand comprises at least two 2′-fluoro modifications; (iii) the sense strand and the antisense strand show sufficient complementarity to form a double stranded region spanning at least 19 nucleotide positions; (iv) the sense strand comprises at least 1, 2, 3, 4, 5, 6, 7, 8, 9 or 10 LNA modifications, and wherein the thermally destabilizing modification of the duplex is located within said double-stranded region, and wherein no 2′-modification is present at positions 3-9 of the antisense strand (counting from 5′-end of the antisense strand), wherein the destabilizing modification is selected from mUNA and GNA building blocks described in Examples 1-3 herein. In some embodiments, the destabilizing modification is selected from the group consisting of GNA-isoC, GNA-isoG, 5′-mUNA, 4′-mUNA, 3′-mUNA, and 2′-mUNA. In some further embodiments of this, the dsRNA molecule further comprises at least one thermally destabilizing modification selected from the group consisting of GNA, 2′-OMe, 3′-OMe, 5′-Me, Hy p-spacer, SNA, hGNA, hhGNA, mGNA, TNA and h′GNA (Mod A-Mod K).

[0273] In some embodiments, the dsRNA molecule comprises a sense strand and an antisense strand, each strand having 14 to 40 nucleotides, wherein the antisense strand has sufficient complementarity to the target sequence to mediate RNA interference, wherein the dsRNA comprises at least four 2′-fluoro, where no 2′-modification is present at positions 3-9 of the antisense strand (counting from 5′-end of the antisense strand), wherein said antisense strand comprises at least one thermally destabilizing modification of the duplex within the first 9 nucleotide positions, counting from the 5′-end, and wherein said sense strand comprises a ligand, and wherein the destabilizing modification is selected from mUNA and GNA building blocks described in Examples 1-3 herein. In some embodiments, the destabilizing modification is selected from the group consisting of GNA-isoC, GNA-isoG, 5′-mUNA, 4′-mUNA, 3′-mUNA, and 2′-mUNA. In some further embodiments of this, the dsRNA molecule further comprises at least one thermally destabilizing modification selected from the group consisting of GNA, 2′-OMe, 3′-OMe, 5′-Me, Hy p-spacer, SNA, hGNA, hhGNA, mGNA, TNA and h′GNA (Mod A-Mod K).

[0274] In some embodiments, the dsRNA molecule comprises a sense strand and an antisense strand, each strand having 14 to 40 nucleotides, wherein the antisense strand has sufficient complementarity to the target sequence to mediate RNA interference, wherein said antisense strand comprises at least one thermally destabilizing modification of the duplex located in position 4-8, counting from the 5′-end, wherein said sense strand comprises a ligand, and wherein each of the sense and antisense strands comprise at least two 2′-fluoro modifications, wherein no 2′-modification is present at positions 3-9 of the antisense strand (counting from 5′-end of the antisense strand), and wherein the destabilizing modification is selected from mUNA and GNA building blocks described in Examples 1-3 herein. In some embodiments, the destabilizing modification is selected from the group consisting of GNA-isoC, GNA-isoG, 5′-mUNA, 4′-mUNA, 3′-mUNA, and 2′-mUNA. In some further embodiments of this, the dsRNA molecule further comprises at least one thermally destabilizing modification selected from the group consisting of GNA, 2′-OMe, 3′-OMe, 5′-Me, Hy p-spacer, SNA, hGNA, hhGNA, mGNA, TNA and h′GNA (Mod A-Mod K).

[0275] In some embodiments, the dsRNA molecule comprises a sense strand and an antisense strand, each strand having 14 to 40 nucleotides, wherein the antisense strand has sufficient complementarity to the target sequence to mediate RNA interference, wherein the dsRNA comprises at least four 2′-fluoro, wherein no 2′-modification is present at positions 3-9 of the antisense strand (counting from 5′-end of the antisense strand), wherein said antisense strand comprises at least one thermally destabilizing modification of the duplex located at position 5, 6 or 7, counting from the 5′-end of the antisense strand, and wherein said sense strand comprises a ligand, wherein the destabilizing modification is selected from mUNA and GNA building blocks described in Examples 1-3 herein. In some embodiments, the destabilizing modification is selected from the group consisting of GNA-isoC, GNA-isoG, 5′-mUNA, 4′-mUNA, 3′-mUNA, and 2′-mUNA. In some further embodiments of this, the dsRNA molecule further comprises at least one thermally destabilizing modification selected from the group consisting of GNA, 2′-OMe, 3′-OMe, 5′-Me, Hy p-spacer, SNA, hGNA, hhGNA, mGNA, TNA and h′GNA (Mod A-Mod K).

[0276] In some embodiments, the dsRNA molecule comprises a sense strand and an antisense strand, each strand having 14 to 40 nucleotides, wherein the antisense strand has sufficient complementarity to the target sequence to mediate RNA interference, wherein said antisense strand comprises at least one thermally destabilizing modification of the duplex located at position 5, 6 or 7, counting from the 5′-end, wherein said sense strand comprises a ligand, and wherein each of the sense and antisense strands comprise at least two 2′-fluoro modifications, wherein no 2′-modification is present at positions 3-9 of the antisense strand (counting from 5′-end of the antisense strand) and wherein the destabilizing modification is selected from mUNA and GNA building blocks described in Examples 1-3 herein. In some embodiments, the destabilizing modification is selected from the group consisting of GNA-isoC, GNA-isoG, 5′-mUNA, 4′-mUNA, 3′-mUNA, and 2′-mUNA. In some further embodiments of this, the dsRNA molecule further comprises at least one thermally destabilizing modification selected from the group consisting of GNA, 2′-OMe, 3′-OMe, 5′-Me, Hy p-spacer, SNA, hGNA, hhGNA, mGNA, TNA and h′GNA (Mod A-Mod K).

[0277] In some embodiments, the dsRNA molecule comprises a sense strand and an antisense strand, each strand having 14 to 40 nucleotides, wherein the antisense strand has sufficient complementarity to the target sequence to mediate RNA interference, wherein the dsRNA comprises at least four 2′-fluoro, wherein no 2′-modification is present at positions 3-9 of the antisense strand (counting from 5′-end of the antisense strand), wherein said antisense strand comprises at least one thermally destabilizing modification of the duplex within the first 9 nucleotide positions, counting from the 5′-end, and wherein said sense strand comprises a ligand, wherein the ligand comprises one or more GalNAc derivatives attached through a bivalent or trivalent branched linker, wherein the destabilizing modification is selected from mUNA and GNA building blocks described in Examples 1-3 herein. In some embodiments, the destabilizing modification is selected from the group consisting of GNA-isoC, GNA-isoG, 5′-mUNA, 4′-mUNA, 3′-mUNA, and 2′-mUNA. In some further embodiments of this, the dsRNA molecule further comprises at least one thermally destabilizing modification selected from the group consisting of GNA, 2′-OMe, 3′-OMe, 5′-Me, Hy p-spacer, SNA, hGNA, hhGNA, mGNA, TNA and h′GNA (Mod A-Mod K).

[0278] In some embodiments, the dsRNA molecule comprises a sense strand and an antisense strand, each strand having 14 to 40 nucleotides, wherein the antisense strand has sufficient complementarity to the target sequence to mediate RNA interference, wherein the dsRNA comprises at least four 2′-fluoro, wherein no 2′-modification is present at positions 3-9 of the antisense strand (counting from 5′-end of the antisense strand), wherein said antisense strand comprises at least one thermally destabilizing modification of the duplex within the first 9 nucleotide positions, counting from the 5′-end, and wherein said sense strand comprises a ligand, wherein the ligand is an ASGPR ligand of structure:

[chemical structure]

wherein the destabilizing modification is selected from mUNA and GNA building blocks described in Examples 1-3 herein. In some embodiments, the destabilizing modification is selected from the group consisting of GNA-isoC, GNA-isoG, 5′-mUNA, 4′-mUNA, 3′-mUNA, and 2′-mUNA. In some further embodiments of this, the dsRNA molecule further comprises at least one thermally destabilizing modification selected from the group consisting of GNA, 2′-OMe, 3′-OMe, 5′-Me, Hy p-spacer, SNA, hGNA, hhGNA, mGNA, TNA and h′GNA (Mod A-Mod K).

[0279] In some embodiments, the sense and antisense strands are independently 19, 20, 21, 22, 23, 24 or 25 nucleotides in length; the antisense strand contains at least one thermally destabilizing nucleotide, where the at least one thermally destabilizing nucleotide is in the seed region of the antisense strand (i.e., at position 2-9 of the 5′-end of the antisense strand); wherein the sense strand is conjugated with a ligand, comprises 3 or 4 2′-fluoro modifications, and comprises 0, 1, 2 or 3 phosphorothioate internucleotide linkages; wherein the antisense strand comprises 3, 4, 5 or 6 2′-fluoro modifications, comprises 2, 3, 4 or 5 phosphorothioate internucleotide linkages; and wherein the dsRNA optionally further has at least one (e.g., one, two or all three) of the following characteristics: (i) the dsRNA comprises a duplex region of 12-25 nucleotide pairs in length; (ii) the dsRNA comprises a blunt end at 5′-end of the antisense strand; and (iii) the dsRNA has at least a two nucleotide overhang at the 3′-end of the antisense strand, wherein the destabilizing modification is selected from mUNA and GNA building blocks described in Examples 1-3 herein. In some embodiments, the destabilizing modification is selected from the group consisting of GNA-isoC, GNA-isoG, 5′-mUNA, 4′-mUNA, 3′-mUNA, and 2′-mUNA. In some further embodiments of this, the dsRNA molecule further comprises at least one thermally destabilizing modification selected from the group consisting of GNA, 2′-OMe, 3′-OMe, 5′-Me, Hy p-spacer, SNA, hGNA, hhGNA, mGNA, TNA and h′GNA (Mod A-Mod K).

[0280] In some embodiments, the sense and antisense strands are independently 19, 20, 21, 22, 23, 24 or 25 nucleotides in length; the antisense strand contains at least one thermally destabilizing nucleotide, where the at least one thermally destabilizing nucleotide is in the seed region of the antisense strand (i.e., at position 2-9 of the 5′-end of the antisense strand); wherein the sense strand is conjugated with a ligand, comprises 2′-fluoro modifications at positions 7, 10 and 11 or at positions 7, 9, 10 and 11 (counting from 5′-end of the sense strand), optionally comprises phosphorothioate internucleotide linkages between nucleotide positions 1 and 2, and between nucleotide positions 2 and 3, and optionally comprises 1, 2, 3, 4, 5, 6, 7, 8, 9 or 10 LNA modifications; wherein the antisense strand comprises 3, 4, 5 or 6 2′-fluoro modifications, where no 2′-fluoro modification is present at positions 3-9 of the antisense strand, comprises 2, 3 or 4 phosphorothioate internucleotide linkages; and wherein the dsRNA optionally further has at least one (e.g., one, two or all three) of the following characteristics: (i) the dsRNA comprises a duplex region of 12-25 nucleotide pairs in length; (ii) the dsRNA comprises a blunt end at 5′-end of the antisense strand; and (iii) the dsRNA has at least a two nucleotide overhang at the 3′-end of the antisense strand, wherein the destabilizing modification is selected from mUNA and GNA building blocks described in Examples 1-3 herein. In some embodiments, the destabilizing modification is selected from the group consisting of GNA-isoC, GNA-isoG, 5′-mUNA, 4′-mUNA, 3′-mUNA, and 2′-mUNA. In some further embodiments of this, the dsRNA molecule further comprises at least one thermally destabilizing modification selected from the group consisting of GNA, 2′-OMe, 3′-OMe, 5′-Me, Hy p-spacer, SNA, hGNA, hhGNA, mGNA, TNA and h′GNA (Mod A-Mod K).

[0281] In some embodiments, the sense and antisense strands are independently 19, 20, 21, 22, 23, 24 or 25 nucleotides in length; the antisense strand contains at least one thermally destabilizing nucleotide, where the at least one thermally destabilizing nucleotide is in the seed region of the antisense strand (i.e., at position 2-9 of the 5′-end of the antisense strand); wherein the sense strand is conjugated with a ligand, comprises 3 or 4 2′-fluoro modifications, comprises 0 or 2 phosphorothioate internucleotide linkages, and optionally comprises 1, 2, 3, 4, 5, 6, 7, 8, 9 or 10 LNA modifications; wherein the antisense strand comprises 2′-fluoro modifications at positions 2, 14 or 16, or at positions 2, 14 and 16; and the antisense comprises phosphorothioate internucleotide linkages between nucleotide positions 21 and 22, and between nucleotide positions 22 and 23; and wherein the dsRNA optionally further has at least one (e.g., one, two or all three) of the following characteristics: (i) the dsRNA comprises a duplex region of 12-25 nucleotide pairs in length; (ii) the dsRNA comprises a blunt end at 5′-end of the antisense strand; and (iii) the dsRNA has at least a two nucleotide overhang at the 3′-end of the antisense strand, wherein the destabilizing modification is selected from mUNA and GNA building blocks described in Examples 1-3 herein. In some embodiments, the destabilizing modification is selected from the group consisting of GNA-isoC, GNA-isoG, 5′-mUNA, 4′-mUNA, 3′-mUNA, and 2′-mUNA. In some further embodiments of this, the dsRNA molecule further comprises at least one thermally destabilizing modification selected from the group consisting of GNA, 2′-OMe, 3′-OMe, 5′-Me, Hy p-spacer, SNA, hGNA, hhGNA, mGNA, TNA and h′GNA (Mod A-Mod K).

[0282] In some embodiments, the sense and antisense strands are independently 19, 20, 21, 22, 23, 24 or 25 nucleotides in length; the antisense strand contains at least one thermally destabilizing nucleotide, where the at least one thermally destabilizing nucleotide is in the seed region of the antisense strand (i.e., at position 2-9 of the 5′-end of the antisense strand); wherein the sense strand is conjugated with a ligand, comprises 3 or 4 2′-fluoro modifications, comprises 1, 2, 3, 4, 5, 6, 7, 8, 9 or 10 LNA modifications, and optionally comprises 0 or 2 phosphorothioate internucleotide linkages; wherein the antisense strand comprises 2′-fluoro modifications at positions 2, 14 or 16, or at positions 2, 14 and 16; and the antisense comprises phosphorothioate internucleotide linkages between nucleotide positions 21 and 22, and between nucleotide positions 22 and 23; and wherein the dsRNA optionally further has at least one (e.g., one, two or all three) of the following characteristics: (i) the dsRNA comprises a duplex region of 12-25 nucleotide pairs in length; (ii) the dsRNA comprises a blunt end at 5′-end of the antisense strand; and (iii) the dsRNA has at least a two nucleotide overhang at the 3′-end of the antisense strand, wherein the destabilizing modification is selected from mUNA and GNA building blocks described in Examples 1-3 herein. In some embodiments, the destabilizing modification is selected from the group consisting of GNA-isoC, GNA-isoG, 5′-mUNA, 4′-mUNA, 3′-mUNA, and 2′-mUNA. In some further embodiments of this, the dsRNA molecule further comprises at least one thermally destabilizing modification selected from the group consisting of GNA, 2′-OMe, 3′-OMe, 5′-Me, Hy p-spacer, SNA, hGNA, hhGNA, mGNA, TNA and h′GNA (Mod A-Mod K).

[0283] In some embodiments, the sense and antisense strands are independently 19, 20, 21, 22, 23, 24 or 25 nucleotides in length; the antisense strand contains at least one thermally destabilizing nucleotide, where the at least one thermally destabilizing nucleotide is in the seed region of the antisense strand (i.e., at position 2-9 of the 5′-end of the antisense strand); wherein the sense strand is conjugated with a ligand, comprises 3 or 4 2′-fluoro modifications, comprises 1, 2, 3, 4, 5, 6, 7, 8, 9 or 10 LNA modifications, and comprises 0, 1, 2 or 3 phosphorothioate internucleotide linkages; wherein the antisense strand comprises 2′-fluoro modifications at positions 2, 14 or 16, or at positions 2, 14 and 16; and the antisense comprises phosphorothioate internucleotide linkages between nucleotide positions 21 and 22, and between nucleotide positions 22 and 23; and wherein the dsRNA optionally further has at least one (e.g., one, two or all three) of the following characteristics: (i) the dsRNA comprises a duplex region of 12-25 nucleotide pairs in length; (ii) the dsRNA comprises a blunt end at 5′-end of the antisense strand; and (iii) the dsRNA has at least a two nucleotide overhang at the 3′-end of the antisense strand, wherein the destabilizing modification is selected from mUNA and GNA building blocks described in Examples 1-3 herein. In some embodiments, the destabilizing modification is selected from the group consisting of GNA-isoC, GNA-isoG, 5′-mUNA, 4′-mUNA, 3′-mUNA, and 2′-mUNA. In some further embodiments of this, the dsRNA molecule further comprises at least one thermally destabilizing modification selected from the group consisting of GNA, 2′-OMe, 3′-OMe, 5′-Me, Hy p-spacer, SNA, hGNA, hhGNA, mGNA, TNA and h′GNA (Mod A-Mod K).

[0284] In some embodiments, the sense and antisense strands are independently 19, 20, 21, 22, 23, 24 or 25 nucleotides in length; the antisense strand contains at least one thermally destabilizing nucleotide, where the at least one thermally destabilizing nucleotide is in the seed region of the antisense strand (i.e., at position 2-9 of the 5′-end of the antisense strand); wherein the sense strand is conjugated with a ligand, comprises 3 or 4 2′-fluoro modifications, comprises 0, 1, 2 or 3 phosphorothioate internucleotide linkages, and optionally comprises 1, 2, 3, 4, 5, 6, 7, 8, 9 or 10 LNA modifications; wherein the antisense strand comprises 2′-fluoro modifications at positions 2, 14 or 16; and the antisense comprises phosphorothioate internucleotide linkages between nucleotide positions 21 and 22, between nucleotide positions 22 and 23, between nucleotide positions 1 and 2, between nucleotide positions 2 and 3; and wherein the dsRNA optionally further has at least one (e.g., one, two or all three) of the following characteristics: (i) the dsRNA comprises a duplex region of 12-25 nucleotide pairs in length; (ii) the dsRNA comprises a blunt end at 5′-end of the antisense strand; and (iii) the dsRNA has at least a two nucleotide overhang at the 3′-end of the antisense strand, wherein the destabilizing modification is selected from mUNA and GNA building blocks described in Examples 1-3 herein. In some embodiments, the destabilizing modification is selected from the group consisting of GNA-isoC, GNA-isoG, 5′-mUNA, 4′-mUNA, 3′-mUNA, and 2′-mUNA. In some further embodiments of this, the dsRNA molecule further comprises at least one thermally destabilizing modification selected from the group consisting of GNA, 2′-OMe, 3′-OMe, 5′-Me, Hy p-spacer, SNA, hGNA, hhGNA, mGNA, TNA and h′GNA (Mod A-Mod K).

[0285] In some embodiments, the sense and antisense strands are independently 19, 20, 21, 22, 23, 24 or 25 nucleotides in length; the antisense strand contains at least one thermally destabilizing nucleotide, where the at least one thermally destabilizing nucleotide is in the seed region of the antisense strand (i.e., at position 2-9 of the 5′-end of the antisense strand); wherein the sense strand is conjugated with a ligand, comprises 3 or 4 2′-fluoro modifications, comprises 1, 2, 3, 4, 5, 6, 7, 8, 9 or 10 LNA modifications, and optionally comprises 0, 1, 2 or 3 phosphorothioate internucleotide linkages; wherein the antisense strand comprises 2′-fluoro modifications at positions 2, 14 or 16; and the antisense comprises phosphorothioate internucleotide linkages between nucleotide positions 21 and 22, between nucleotide positions 22 and 23, between nucleotide positions 1 and 2, between nucleotide positions 2 and 3; and wherein the dsRNA optionally further has at least one (e.g., one, two or all three) of the following characteristics: (i) the dsRNA comprises a duplex region of 12-25 nucleotide pairs in length; (ii) the dsRNA comprises a blunt end at 5′-end of the antisense strand; and (iii) the dsRNA has at least a two nucleotide overhang at the 3′-end of the antisense strand, wherein the destabilizing modification is selected from mUNA and GNA building blocks described in Examples 1-3 herein. In some embodiments, the destabilizing modification is selected from the group consisting of GNA-isoC, GNA-isoG, 5′-mUNA, 4′-mUNA, 3′-mUNA, and 2′-mUNA. In some further embodiments of this, the dsRNA molecule further comprises at least one thermally destabilizing modification selected from the group consisting of GNA, 2′-OMe, 3′-OMe, 5′-Me, Hy p-spacer, SNA, hGNA, hhGNA, mGNA, TNA and h′GNA (Mod A-Mod K).

[0286] In some embodiments, the sense and antisense strands are independently 19, 20, 21, 22, 23, 24 or 25 nucleotides in length; the antisense strand contains at least one thermally destabilizing nucleotide, where the at least one thermally destabilizing nucleotide is in the seed region of the antisense strand (i.e., at position 2-9 of the 5′-end of the antisense strand); wherein the sense strand is conjugated with a ligand, comprises 3 or 4 2′-fluoro modifications, comprises 1, 2, 3, 4, 5, 6, 7, 8, 9 or 10 LNA modifications, and comprises 0, 1, 2, or 3 phosphorothioate internucleotide linkages; wherein the antisense strand comprises 2′-fluoro modifications at positions 2, 14 or 16; and the antisense comprises phosphorothioate internucleotide linkages between nucleotide positions 21 and 22, between nucleotide positions 22 and 23, between nucleotide positions 1 and 2, between nucleotide positions 2 and 3; and wherein the dsRNA optionally further has at least one (e.g., one, two or all three) of the following characteristics: (i) the dsRNA comprises a duplex region of 12-25 nucleotide pairs in length; (ii) the dsRNA comprises a blunt end at 5′-end of the antisense strand; and (iii) the dsRNA has at least a two nucleotide overhang at the 3′-end of the antisense strand, wherein the destabilizing modification is selected from mUNA and GNA building blocks described in Examples 1-3 herein. In some embodiments, the destabilizing modification is selected from the group consisting of GNA-isoC, GNA-isoG, 5′-mUNA, 4′-mUNA, 3′-mUNA, and 2′-mUNA. In some further embodiments of this, the dsRNA molecule further comprises at least one thermally destabilizing modification selected from the group consisting of GNA, 2′-OMe, 3′-OMe, 5′-Me, Hy p-spacer, SNA, hGNA, hhGNA, mGNA, TNA and h′GNA (Mod A-Mod K).

[0287] In some embodiments, the sense and antisense strands are independently 19, 20, 21, 22, 23, 24 or 25 nucleotides in length; the antisense strand contains at least one thermally destabilizing nucleotide, where the at least one thermally destabilizing nucleotide is in the seed region of the antisense strand (i.e., at position 2-9 of the 5′-end of the antisense strand); wherein the sense strand is conjugated with a ligand, comprises 2′-fluoro modifications at positions 7, 10 and 11 or at positions 7, 9, 10 and 11 (counting from 5′-end of the sense strand), and optionally comprises phosphorothioate internucleotide linkages between nucleotide positions 1 and 2, and between nucleotide positions 2 and 3, and optionally comprises 1, 2, 3, 4, 5, 6, 7, 8, 9 or 10 LNA modifications; wherein the antisense strand comprises 2′-fluoro modifications at positions 2, 14 and 16; and the antisense comprises phosphorothioate internucleotide linkages between nucleotide positions 21 and 22, and between nucleotide positions 22 and 23; and wherein the dsRNA optionally further has at least one (e.g., one, two or all three) of the following characteristics: (i) the dsRNA comprises a duplex region of 12-25 nucleotide pairs in length; (ii) the dsRNA comprises a blunt end at 5′-end of the antisense strand; and (iii) the dsRNA has at least a two nucleotide overhang at the 3′-end of the antisense strand, wherein the destabilizing modification is selected from mUNA and GNA building blocks described in Examples 1-3 herein. In some embodiments, the destabilizing modification is selected from the group consisting of GNA-isoC, GNA-isoG, 5′-mUNA, 4′-mUNA, 3′-mUNA, and 2′-mUNA. In some further embodiments of this, the dsRNA molecule further comprises at least one thermally destabilizing modification selected from the group consisting of GNA, 2′-OMe, 3′-OMe, 5′-Me, Hy p-spacer, SNA, hGNA, hhGNA, mGNA, TNA and h′GNA (Mod A-Mod K).

[0288] In some embodiments, the sense and antisense strands are independently 19, 20, 21, 22, 23, 24 or 25 nucleotides in length; the antisense strand contains at least one thermally destabilizing nucleotide, where the at least one thermally destabilizing nucleotide is in the seed region of the antisense strand (i.e., at position 2-9 of the 5′-end of the antisense strand); wherein the sense strand is conjugated with a ligand, comprises 2′-fluoro modifications at positions 7, 10 and 11 or at positions 7, 9, 10 and 11 (counting from 5′-end of the sense strand), comprises phosphorothioate internucleotide linkages between nucleotide positions 1 and 2, and between nucleotide positions 2 and 3, and optionally comprises 1, 2, 3, 4, 5, 6, 7, 8, 9 or 10 LNA modifications; wherein the antisense strand comprises 2′-fluoro modifications at positions 2, 14 and 16; and the antisense comprises phosphorothioate internucleotide linkages between nucleotide positions 21 and 22, and between nucleotide positions 22 and 23; and wherein the dsRNA optionally further has at least one (e.g., one, two or all three) of the following characteristics: (i) the dsRNA comprises a duplex region of 12-25 nucleotide pairs in length; (ii) the dsRNA comprises a blunt end at 5′-end of the antisense strand; and (iii) the dsRNA has at least a two nucleotide overhang at the 3′-end of the antisense strand, wherein the destabilizing modification is selected from mUNA and GNA building blocks described in Examples 1-3 herein. In some embodiments, the destabilizing modification is selected from the group consisting of GNA-isoC, GNA-isoG, 5′-mUNA, 4′-mUNA, 3′-mUNA, and 2′-mUNA. In some further embodiments of this, the dsRNA molecule further comprises at least one thermally destabilizing modification selected from the group consisting of GNA, 2′-OMe, 3′-OMe, 5′-Me, Hy p-spacer, SNA, hGNA, hhGNA, mGNA, TNA and h′GNA (Mod A-Mod K).

[0289] In some embodiments, the sense and antisense strands are independently 19, 20, 21, 22, 23, 24 or 25 nucleotides in length; the antisense strand contains at least one thermally destabilizing nucleotide, where the at least one thermally destabilizing nucleotide is in the seed region of the antisense strand (i.e., at position 2-9 of the 5′-end of the antisense strand); wherein the sense strand is conjugated with a ligand, comprises 2′-fluoro modifications at positions 7, 10 and 11 or at positions 7, 9, 10 and 11 (counting from 5′-end of the sense strand), comprises 1, 2, 3, 4, 5, 6, 7, 8, 9 or 10 LNA modifications and optionally comprises phosphorothioate internucleotide linkages between nucleotide positions 1 and 2, and between nucleotide positions 2 and 3; wherein the antisense strand comprises 2′-fluoro modifications at positions 2, 14 and 16; and the antisense comprises phosphorothioate internucleotide linkages between nucleotide positions 21 and 22, and between nucleotide positions 22 and 23; and wherein the dsRNA optionally further has at least one (e.g., one, two or all three) of the following characteristics: (i) the dsRNA comprises a duplex region of 12-25 nucleotide pairs in length; (ii) the dsRNA comprises a blunt end at 5′-end of the antisense strand; and (iii) the dsRNA has at least a two nucleotide overhang at the 3′-end of the antisense strand, wherein the destabilizing modification is selected from mUNA and GNA building blocks described in Examples 1-3 herein. In some embodiments, the destabilizing modification is selected from the group consisting of GNA-isoC, GNA-isoG, 5′-mUNA, 4′-mUNA, 3′-mUNA, and 2′-mUNA. In some further embodiments of this, the dsRNA molecule further comprises at least one thermally destabilizing modification selected from the group consisting of GNA, 2′-OMe, 3′-OMe, 5′-Me, Hy p-spacer, SNA, hGNA, hhGNA, mGNA, TNA and h′GNA (Mod A-Mod K).

[0290] In some embodiments, the sense and antisense strands are independently 19, 20, 21, 22, 23, 24 or 25 nucleotides in length; the antisense strand contains at least one thermally destabilizing nucleotide, where the at least one thermally destabilizing nucleotide is in the seed region of the antisense strand (i.e., at position 2-9 of the 5′-end of the antisense strand); wherein the sense strand is conjugated with a ligand, comprises 2′-fluoro modifications at positions 7, 10 and 11 or at positions 7, 9, 10 and 11 (counting from 5′-end of the sense strand), comprises 1, 2, 3, 4, 5, 6, 7, 8, 9 or 10 LNA modifications, and comprises phosphorothioate internucleotide linkages between nucleotide positions 1 and 2, and between nucleotide positions 2 and 3; wherein the antisense strand comprises 2′-fluoro modifications at positions 2, 14 and 16; and the antisense comprises phosphorothioate internucleotide linkages between nucleotide positions 21 and 22, and between nucleotide positions 22 and 23; and wherein the dsRNA optionally further has at least one (e.g., one, two or all three) of the following characteristics: (i) the dsRNA comprises a duplex region of 12-25 nucleotide pairs in length; (ii) the dsRNA comprises a blunt end at 5′-end of the antisense strand; and (iii) the dsRNA has at least a two nucleotide overhang at the 3′-end of the antisense strand, wherein the destabilizing modification is selected from mUNA and GNA building blocks described in Examples 1-3 herein. In some embodiments, the destabilizing modification is selected from the group consisting of GNA-isoC, GNA-isoG, 5′-mUNA, 4′-mUNA, 3′-mUNA, and 2′-mUNA. In some further embodiments of this, the dsRNA molecule further comprises at least one thermally destabilizing modification selected from the group consisting of GNA, 2′-OMe, 3′-OMe, 5′-Me, Hy p-spacer, SNA, hGNA, hhGNA, mGNA, TNA and h′GNA (Mod A-Mod K).

[0291] In some embodiments, the sense and antisense strands are independently 19, 20, 21, 22, 23, 24 or 25 nucleotides in length; the antisense strand contains at least one thermally destabilizing nucleotide, where the at least one thermally destabilizing nucleotide is in the seed region of the antisense strand (i.e., at position 2-9 of the 5′-end of the antisense strand); wherein the sense strand is conjugated with a ligand, comprises 2′-fluoro modifications at positions 7, 10 and 11 or at positions 7, 9, 10 and 11 (counting from 5′-end of the sense strand), optionally comprises phosphorothioate internucleotide linkages between nucleotide positions 1 and 2, and between nucleotide positions 2 and 3, and optionally comprises 1, 2, 3, 4, 5, 6, 7, 8, 9 or 10 LNA modifications; wherein the antisense strand comprises 2′-fluoro modifications at positions 2, 14 or 16; and the antisense comprises phosphorothioate internucleotide linkages between nucleotide positions 21 and 22, between nucleotide positions 22 and 23, between nucleotide positions 1 and 2, between nucleotide positions 2 and 3; and wherein the dsRNA optionally further has at least one (e.g., one, two or all three) of the following characteristics: (i) the dsRNA comprises a duplex region of 12-25 nucleotide pairs in length; (ii) the dsRNA comprises a blunt end at 5′-end of the antisense strand; and (iii) the dsRNA has at least a two nucleotide overhang at the 3′-end of the antisense strand, wherein the destabilizing modification is selected from mUNA and GNA building blocks described in Examples 1-3 herein. In some embodiments, the destabilizing modification is selected from the group consisting of GNA-isoC, GNA-isoG, 5′-mUNA, 4′-mUNA, 3′-mUNA, and 2′-mUNA. In some further embodiments of this, the dsRNA molecule further comprises at least one thermally destabilizing modification selected from the group consisting of GNA, 2′-OMe, 3′-OMe, 5′-Me, Hy p-spacer, SNA, hGNA, hhGNA, mGNA, TNA and h′GNA (Mod A-Mod K).

[0292] In some embodiments, the sense and antisense strands are independently 19, 20, 21, 22, 23, 24 or 25 nucleotides in length; the antisense strand contains at least one thermally destabilizing nucleotide, where the at least one thermally destabilizing nucleotide is in the seed region of the antisense strand (i.e., at position 2-9 of the 5′-end of the antisense strand); wherein the sense strand is conjugated with a ligand, comprises 2′-fluoro modifications at positions 7, 10 and 11 or at positions 7, 9, 10 and 11 (counting from 5′-end of the sense strand), comprises phosphorothioate internucleotide linkages between nucleotide positions 1 and 2, and between nucleotide positions 2 and 3, and optionally comprises 1, 2, 3, 4, 5, 6, 7, 8, 9 or 10 LNA modifications; wherein the antisense strand comprises 2′-fluoro modifications at positions 2, 14 or 16; and the antisense comprises phosphorothioate internucleotide linkages between nucleotide positions 21 and 22, between nucleotide positions 22 and 23, between nucleotide positions 1 and 2, between nucleotide positions 2 and 3; and wherein the dsRNA optionally further has at least one (e.g., one, two or all three) of the following characteristics: (i) the dsRNA comprises a duplex region of 12-25 nucleotide pairs in length; (ii) the dsRNA comprises a blunt end at 5′-end of the antisense strand; and (iii) the dsRNA has at least a two nucleotide overhang at the 3′-end of the antisense strand, wherein the destabilizing modification is selected from mUNA and GNA building blocks described in Examples 1-3 herein. In some embodiments, the destabilizing modification is selected from the group consisting of GNA-isoC, GNA-isoG, 5′-mUNA, 4′-mUNA, 3′-mUNA, and 2′-mUNA. In some further embodiments of this, the dsRNA molecule further comprises at least one thermally destabilizing modification selected from the group consisting of GNA, 2′-OMe, 3′-OMe, 5′-Me, Hy p-spacer, SNA, hGNA, hhGNA, mGNA, TNA and h′GNA (Mod A-Mod K).

[0293] In some embodiments, the sense and antisense strands are independently 19, 20, 21, 22, 23, 24 or 25 nucleotides in length; the antisense strand contains at least one thermally destabilizing nucleotide, where the at least one thermally destabilizing nucleotide is in the seed region of the antisense strand (i.e., at position 2-9 of the 5′-end of the antisense strand); wherein the sense strand is conjugated with a ligand, comprises 2′-fluoro modifications at positions 7, 10 and 11 or at positions 7, 9, 10 and 11 (counting from 5′-end of the sense strand), optionally comprises 1, 2, 3, 4, 5, 6, 7, 8, 9 or 10 LNA modifications, and optionally comprises phosphorothioate internucleotide linkages between nucleotide positions 1 and 2, and between nucleotide positions 2 and 3; wherein the antisense strand comprises 2′-fluoro modifications at positions 2, 14 or 16; and the antisense comprises phosphorothioate internucleotide linkages between nucleotide positions 21 and 22, between nucleotide positions 22 and 23, between nucleotide positions 1 and 2, between nucleotide positions 2 and 3; and wherein the dsRNA optionally further has at least one (e.g., one, two or all three) of the following characteristics: (i) the dsRNA comprises a duplex region of 12-25 nucleotide pairs in length; (ii) the dsRNA comprises a blunt end at 5′-end of the antisense strand; and (iii) the dsRNA has at least a two nucleotide overhang at the 3′-end of the antisense strand, wherein the destabilizing modification is selected from mUNA and GNA building blocks described in Examples 1-3 herein. In some embodiments, the destabilizing modification is selected from the group consisting of GNA-isoC, GNA-isoG, 5′-mUNA, 4′-mUNA, 3′-mUNA, and 2′-mUNA. In some further embodiments of this, the dsRNA molecule further comprises at least one thermally destabilizing modification selected from the group consisting of GNA, 2′-OMe, 3′-OMe, 5′-Me, Hy p-spacer, SNA, hGNA, hhGNA, mGNA, TNA and h′GNA (Mod A-Mod K).

[0294] In some embodiments, the dsRNA molecule comprises a sense strand and an antisense strand, each strand having 14 to 40 nucleotides, wherein the antisense strand has sufficient complementarity to the target sequence to mediate RNA interference and wherein the antisense strand comprises at least one thermally destabilizing modification of the duplex within the seed region (i.e., at position 2-9 of the 5′-end of the antisense strand, counting from the 5′-end), the dsRNA has a melting temperature (Tₘ) of from about 40° C. to about 80° C., and the dsRNA optionally further has at least one (e.g., one, two, three, four, five, six, seven, eight or all nine) of the following characteristics: (i) the antisense comprises 2, 3, 4, 5 or 6 2′-fluoro modifications; (ii) the antisense comprises 1, 2, 3, 4 or 5 phosphorothioate internucleotide linkages; (iii) the sense strand is conjugated with a ligand; (iv) the sense strand comprises 2, 3, 4 or 5 2′-fluoro modifications; (v) the sense strand comprises 1, 2, 3, 4 or 5 phosphorothioate internucleotide linkages; (vi) the dsRNA comprises at least four 2′-fluoro modifications; (vii) the dsRNA comprises a duplex region of 12-40 nucleotide pairs in length; (viii) a blunt end at 5′end of the antisense strand; (ix) provided that no 2′-fluoro modification is present at positions 3-9 (counting from 5′-end) of the antisense strand, wherein the destabilizing modification is selected from mUNA and GNA building blocks described in Examples 1-3 herein. In some embodiments, the destabilizing modification is selected from the group consisting of GNA-isoC, GNA-isoG, 5′-mUNA, 4′-mUNA, 3′-mUNA, and 2′-mUNA. In some further embodiments of this, the dsRNA molecule further comprises at least one thermally destabilizing modification selected from the group consisting of GNA, 2′-OMe, 3′-OMe, 5′-Me, Hy p-spacer, SNA, hGNA, hhGNA, mGNA, TNA and h′GNA (Mod A-Mod K). In some embodiments, the melting temperature of about 40° C. to about 80° C. is optional.

[0295] In some embodiments, the dsRNA molecule has a duplex region of 12-40 nucleotide pairs in length, wherein the antisense strand comprises at least one thermally destabilizing modification of the duplex within the seed region (i.e., at position 2-9 of the 5′-end of the antisense strand, counting from the 5′-end), and the dsRNA has a Tₘ of from about 40° C. to about 80° C., and wherein the dsRNA optionally further has at least one (e.g., one, two, three, four, five, six or all seven) of the following characteristics: (i) the antisense comprises 2, 3, 4, 5 or 6 2′-fluoro modifications; (ii) the antisense comprises 1, 2, 3, 4 or 5 phosphorothioate internucleotide linkages; (iii) the sense strand is conjugated with a ligand; (iv) the sense strand comprises 2, 3, 4 or 5 2′-fluoro modifications; (v) the sense strand comprises 1, 2, 3, 4 or 5 phosphorothioate internucleotide linkages; (vi) the dsRNA comprises at least four 2′-fluoro modifications; and vii) a blunt end at 5′end of the antisense strand, provided that no 2′-fluoro modification is present at positions 3-9 (counting from 5′-end) of the antisense strand, wherein the destabilizing modification is selected from mUNA and GNA building blocks described in Examples 1-3 herein. In some embodiments, the destabilizing modification is selected from the group consisting of GNA-isoC, GNA-isoG, 5′-mUNA, 4′-mUNA, 3′-mUNA, and 2′-mUNA. In some further embodiments of this, the dsRNA molecule further comprises at least one thermally destabilizing modification selected from the group consisting of GNA, 2′-OMe, 3′-OMe, 5′-Me, Hy p-spacer, SNA, hGNA, hhGNA, mGNA, TNA and h′GNA (Mod A-Mod K). In some embodiments, the melting temperature of about 40° C. to about 80° C. is optional.

[0296] In some embodiments, the dsRNA molecule has a duplex region of 19, 20, 21, 22 or 23 nucleotide base pairs in length, wherein the antisense strand contains at least one thermally destabilizing modification of the duplex located in the seed region of the antisense strand (i.e., at position 2-9 of the 5′-end of the antisense strand), and wherein the dsRNA has a melting temperature of about 40° C. to about 80° C., provided that no 2′-fluoro modification is present at positions 3-9 (counting from 5′-end) of the antisense strand, wherein the destabilizing modification is selected from mUNA and GNA building blocks described in Examples 1-3 herein. In some embodiments, the destabilizing modification is selected from the group consisting of GNA-isoC, GNA-isoG, 5′-mUNA, 4′-mUNA, 3′-mUNA, and 2′-mUNA. In some further embodiments of this, the dsRNA molecule further comprises at least one thermally destabilizing modification selected from the group consisting of GNA, 2′-OMe, 3′-OMe, 5′-Me, Hy p-spacer, SNA, hGNA, hhGNA, mGNA, TNA and h′GNA (Mod A-Mod K). In some embodiments, the melting temperature of about 40° C. to about 80° C. is optional.

[0297] In a particular embodiment, the dsRNA molecules of the present invention comprise:
[0298] (a) a sense strand having:
   [0299] (i) a length of 21 nucleotides;
   [0300] (ii) an ASGPR ligand attached to the 3′-end, wherein said ASGPR ligand comprises three GalNAc derivatives attached through a trivalent branched linker; and
   [0301] (iii) 2′-F modifications at positions 7, 10, and 11 (counting from the 5′ end);
   [0302] and
[0303] (b) an antisense strand having:
   [0304] (i) a length of 23 nucleotides;
   [0305] (ii) 2′-F modifications at positions 2, 14, and 16 (counting from the 5′ end);
   [0306] (iii) phosphorothioate internucleotide linkages between nucleotide positions 21 and 22, and between nucleotide positions 22 and 23 (counting from the 5′ end); and
   [0307] (iv) a thermally destabilizing modification of the duplex at position 5, 6 or 7 (counting from the 5′ end);
      [0308] wherein the dsRNA molecules have a two nucleotide overhang at the 3′-end of the antisense strand, and a blunt end at the 5′-end of the antisense strand, wherein the destabilizing modification is selected from mUNA and GNA building blocks described in Examples 1-3 herein. In some embodiments, the destabilizing modification is selected from the group consisting of GNA-isoC, GNA-isoG, 5′-mUNA, 4′-mUNA, 3′-mUNA, and 2′-mUNA. In some further embodiments of this, the dsRNA molecule further comprises at least one thermally destabilizing modification selected from the group consisting of GNA, 2′-OMe, 3′-OMe, 5′-Me, Hy p-spacer, SNA, hGNA, hhGNA, mGNA, TNA and h′GNA (Mod A-Mod K).

[0309] In another particular embodiment, the dsRNA molecules of the present invention comprise:
[0310] (a) a sense strand having:
   [0311] (i) a length of 21 nucleotides;
   [0312] (ii) an ASGPR ligand attached to the 3′-end, wherein said ASGPR ligand comprises three GalNAc derivatives attached through a trivalent branched linker;
   [0313] (iii) 2′-F modifications at positions 7, 9, 10, and 11 (counting from the 5′ end); and
   [0314] (iv) phosphorothioate internucleotide linkages between nucleotide positions 1 and 2, and between nucleotide positions 2 and 3 (counting from the 5′ end);
   [0315] and
[0316] (b) an antisense strand having:
   [0317] (i) a length of 23 nucleotides;
   [0318] (ii) 2′-F modifications at positions 2, 14, and 16 (counting from the 5′ end);
   [0319] (iii) phosphorothioate internucleotide linkages between nucleotide positions 1 and 2, between nucleotide positions 2 and 3, between nucleotide positions 21 and 22, and between nucleotide positions 22 and 23 (counting from the 5′ end); and
   [0320] (iv) a thermally destabilizing modification of the duplex at position 5, 6 or 7 (counting from the 5′ end);
      wherein the dsRNA molecules have a two nucleotide overhang at the 3′-end of the antisense strand, and a blunt end at the 5′-end of the antisense strand, wherein the destabilizing modification is selected from mUNA and GNA building blocks described in Examples 1-3 herein. In some embodiments, the destabilizing modification is selected from the group consisting of GNA-isoC, GNA-isoG, 5′-mUNA, 4′-mUNA, 3′-mUNA, and 2′-mUNA. In some further embodiments of this, the dsRNA molecule further comprises at least one thermally destabilizing modification selected from the group consisting of GNA, 2′-OMe, 3′-OMe, 5′-Me, Hy p-spacer, SNA, hGNA, hhGNA, mGNA, TNA and h′GNA (Mod A-Mod K).

[0321] In another particular embodiment, the dsRNA molecules of the present invention comprise:
[0322] (a) a sense strand having:
[0323] (i) a length of 21 nucleotides;
[0324] (ii) an ASGPR ligand attached to the 3′-end, wherein said ASGPR ligand comprises three GalNAc derivatives attached through a trivalent branched linker;
[0325] (iii) 2′-F modifications at positions 7, 9, 10, and 11 (counting from the 5′ end); and
[0326] (iv) phosphorothioate internucleotide linkages between nucleotide positions 1 and 2, and between nucleotide positions 2 and 3 (counting from the 5′ end);
[0327] and
[0328] (b) an antisense strand having:
[0329] (i) a length of 23 nucleotides;
[0330] (ii) 2′-F modifications at positions 2, 14, and 16 (counting from the 5′ end);
[0331] (iii) phosphorothioate internucleotide linkages between nucleotide positions 1 and 2, between nucleotide positions 2 and 3, between nucleotide positions 21 and 22, and between nucleotide positions 22 and 23 (counting from the 5′ end); and
[0332] (iv) a thermally destabilizing modification of the duplex at position 5, 6 or 7 (counting from the 5′ end);
   wherein the dsRNA molecules have a two nucleotide overhang at the 3′-end of the antisense strand, and a blunt end at the 5′-end of the antisense strand, wherein the destabilizing modification is selected from mUNA and GNA building blocks described in Examples 1-3 herein. In some embodiments, the destabilizing modification is selected from the group consisting of GNA-isoC, GNA-isoG, 5′-mUNA, 4′-mUNA, 3′-mUNA, and 2′-mUNA. In some further embodiments of this, the dsRNA molecule further comprises at least one thermally destabilizing modification selected from the group consisting of GNA, 2′-OMe, 3′-OMe, 5′-Me, Hy p-spacer, SNA, hGNA, hhGNA, mGNA, TNA and h′GNA (Mod A-Mod K).

[0333] In another particular embodiment, the dsRNA molecules of the present invention comprise:
[0334] (a) a sense strand having:
   [0335] (i) a length of 21 nucleotides;
   [0336] (ii) an ASGPR ligand attached to the 3′-end, wherein said ASGPR ligand comprises three GalNAc derivatives attached through a trivalent branched linker;
   [0337] (iii) 2′-F modifications at positions 7, 9, 10, and 11 (counting from the 5′ end); and
   [0338] (iv) at least one (e.g., one, two, three, four, five, six, seven, eight, nine, ten or more) LNA modification;
   [0339] and
[0340] (b) an antisense strand having:
   [0341] (i) a length of 23 nucleotides;
   [0342] (ii) 2′-F modifications at positions 2, 14, and 16 (counting from the 5′ end);
   [0343] (iii) phosphorothioate internucleotide linkages between nucleotide positions 1 and 2, between nucleotide positions 2 and 3, between nucleotide positions 21 and 22, and between nucleotide positions 22 and 23 (counting from the 5′ end); and
   [0344] (iv) a thermally destabilizing modification of the duplex at position 5, 6 or 7 (counting from the 5′ end);
      wherein the dsRNA molecules have a two nucleotide overhang at the 3′-end of the antisense strand, and a blunt end at the 5′-end of the antisense strand, wherein the destabilizing modification is selected from mUNA and GNA building blocks described in Examples 1-3 herein. In some embodiments, the destabilizing modification is selected from the group consisting of GNA-isoC, GNA-isoG, 5′-mUNA, 4′-mUNA, 3′-mUNA, and 2′-mUNA. In some further embodiments of this, the dsRNA molecule further comprises at least one thermally destabilizing modification selected from the group consisting of GNA, 2′-OMe, 3′-OMe, 5′-Me, Hy p-spacer, SNA, hGNA, hhGNA, mGNA, TNA and h′GNA (Mod A-Mod K).

[0345] In another particular embodiment, the dsRNA molecules of the present invention comprise:
[0346] (a) a sense strand having:
   [0347] (i) a length of 21 nucleotides;
   [0348] (ii) an ASGPR ligand attached to the 3′-end, wherein said ASGPR ligand comprises three GalNAc derivatives attached through a trivalent branched linker;
   [0349] (iii) 2′-F modifications at positions 7, 9, 10, and 11 (counting from the 5′ end); and
   [0350] (iv) at least one (e.g., one, two or three) LNA modifications at positions 1, 2 and 3 (counting from the 5′ end);
   [0351] and
[0352] (b) an antisense strand having:
   [0353] (i) a length of 23 nucleotides;
   [0354] (ii) 2′-F modifications at positions 2, 14, and 16 (counting from the 5′ end);
   [0355] (iii) phosphorothioate internucleotide linkages between nucleotide positions 1 and 2, between nucleotide positions 2 and 3, between nucleotide positions 21 and 22, and between nucleotide positions 22 and 23 (counting from the 5′ end); and
   [0356] (iv) a thermally destabilizing modification of the duplex at position 5, 6 or 7 (counting from the 5′ end);
      wherein the dsRNA molecules have a two nucleotide overhang at the 3′-end of the antisense strand, and a blunt end at the 5′-end of the antisense strand, wherein the destabilizing modification is selected from mUNA and GNA building blocks described in Examples 1-3 herein. In some embodiments, the destabilizing modification is selected from the group consisting of GNA-isoC, GNA-isoG, 5′-mUNA, 4′-mUNA, 3′-mUNA, and 2′-mUNA. In some further embodiments of this, the dsRNA molecule further comprises at least one thermally destabilizing modification selected from the group consisting of GNA, 2′-OMe, 3′-OMe, 5′-Me, Hy p-spacer, SNA, hGNA, hhGNA, mGNA, TNA and h′GNA (Mod A-Mod K).

[0357] In another particular embodiment, the dsRNA molecules of the present invention comprise:
[0358] (a) a sense strand having:
[0359] (i) a length of 21 nucleotides;
[0360] (ii) an ASGPR ligand attached to the 3′-end, wherein said ASGPR ligand comprises three GalNAc derivatives attached through a trivalent branched linker;
[0361] (iii) 2′-F modifications at positions 7, 9, 10, and 11 (counting from the 5′ end);
[0362] (iv) at least one (e.g., one, two, three, four, five, six, seven, eight, nine, ten or more) LNA modification; and
[0363] (iv) phosphorothioate internucleotide linkages between nucleotide positions 1 and 2, and between nucleotide positions 2 and 3 (counting from the 5′ end);
[0364] and
[0365] (b) an antisense strand having:
[0366] (i) a length of 23 nucleotides;
[0367] (ii) 2′-F modifications at positions 2, 14, and 16 (counting from the 5′ end);
[0368] (iii) phosphorothioate internucleotide linkages between nucleotide positions 1 and 2, between nucleotide positions 2 and 3, between nucleotide positions 21 and 22, and between nucleotide positions 22 and 23 (counting from the 5′ end); and
[0369] (iv) a thermally destabilizing modification of the duplex at position 5, 6 or 7 (counting from the 5′ end);
   wherein the dsRNA molecules have a two nucleotide overhang at the 3′-end of the antisense strand, and a blunt end at the 5′-end of the antisense strand, wherein the destabilizing modification is selected from mUNA and GNA building blocks described in Examples 1-3 herein. In some embodiments, the destabilizing modification is selected from the group consisting of GNA-isoC, GNA-isoG, 5′-mUNA, 4′-mUNA, 3′-mUNA, and 2′-mUNA. In some further embodiments of this, the dsRNA molecule further comprises at least one thermally destabilizing modification selected from the group consisting of GNA, 2′-OMe, 3′-OMe, 5′-Me, Hy p-spacer, SNA, hGNA, hhGNA, mGNA, TNA and h′GNA (Mod A-Mod K).

[0370] In another particular embodiment, the dsRNA molecules of the present invention comprise:
[0371] (a) a sense strand having:
   [0372] (i) a length of 21 nucleotides;
   [0373] (ii) an ASGPR ligand attached to the 3′-end, wherein said ASGPR ligand comprises three GalNAc derivatives attached through a trivalent branched linker;
   [0374] (iii) 2′-F modifications at positions 7, 9, 10, and 11 (counting from the 5′ end); and
   [0375] (iv) at least one (e.g., one, two or three) LNA modifications at positions 1, 2 and 3 (counting from the 5′ end);
   [0376] and
[0377] (b) an antisense strand having:
   [0378] (i) a length of 23 nucleotides;
   [0379] (ii) 2′-F modifications at positions 2, 14, and 16 (counting from the 5′ end);
   [0380] (iii) phosphorothioate internucleotide linkages between nucleotide positions 1 and 2, between nucleotide positions 2 and 3, between nucleotide positions 21 and 22, and between nucleotide positions 22 and 23 (counting from the 5′ end); and
   [0381] (iv) a thermally destabilizing modification of the duplex at position 5, 6 or 7 (counting from the 5′ end);
      wherein the dsRNA molecules have a two nucleotide overhang at the 3′-end of the antisense strand, and a blunt end at the 5′-end of the antisense strand, wherein the destabilizing modification is selected from mUNA and GNA building blocks described in Examples 1-3 herein. In some embodiments, the destabilizing modification is selected from the group consisting of GNA-isoC, GNA-isoG, 5′-mUNA, 4′-mUNA, 3′-mUNA, and 2′-mUNA. In some further embodiments of this, the dsRNA molecule further comprises at least one thermally destabilizing modification selected from the group consisting of GNA, 2′-OMe, 3′-OMe, 5′-Me, Hy p-spacer, SNA, hGNA, hhGNA, mGNA, TNA and h′GNA (Mod A-Mod K).

[0382] In another particular embodiment, the dsRNA molecules of the present invention comprise:
[0383] (a) a sense strand having:
[0384] (i) a length of 21 nucleotides;
[0385] (ii) an ASGPR ligand attached to the 3′-end, wherein said ASGPR ligand comprises three GalNAc derivatives attached through a trivalent branched linker;
[0386] (iii) 2′-F modifications at positions 7, 9, 10, and 11 (counting from the 5′ end);
[0387] (iv) at least one (e.g., one, two or three) LNA modifications at positions 1, 2 and 3 (counting from the 5′ end); and
[0388] (iv) phosphorothioate internucleotide linkages between nucleotide positions 1 and 2, and between nucleotide positions 2 and 3 (counting from the 5′ end);
[0389] and
[0390] (b) an antisense strand having:
[0391] (i) a length of 23 nucleotides;
[0392] (ii) 2′-F modifications at positions 2, 14, and 16 (counting from the 5′ end);
[0393] (iii) phosphorothioate internucleotide linkages between nucleotide positions 1 and 2, between nucleotide positions 2 and 3, between nucleotide positions 21 and 22, and between nucleotide positions 22 and 23 (counting from the 5′ end); and
[0394] (iv) a thermally destabilizing modification of the duplex at position 5, 6 or 7 (counting from the 5′ end);
   wherein the dsRNA molecules have a two nucleotide overhang at the 3′-end of the antisense strand, and a blunt end at the 5′-end of the antisense strand, wherein the destabilizing modification is selected from mUNA and GNA building blocks described in Examples 1-3 herein. In some embodiments, the destabilizing modification is selected from the group consisting of GNA-isoC, GNA-isoG, 5′-mUNA, 4′-mUNA, 3′-mUNA, and 2′-mUNA. In some further embodiments of this, the dsRNA molecule further comprises at least one thermally destabilizing modification selected from the group consisting of GNA, 2′-OMe, 3′-OMe, 5′-Me, Hy p-spacer, SNA, hGNA, hhGNA, mGNA, TNA and h′GNA (Mod A-Mod K).

[0395] In some embodiments, the sense and antisense strands are independently 19, 20, 21, 22, 23, 24 or 25 nucleotides in length, wherein the antisense strand contains at least one thermally destabilizing nucleotide, and where the at least one thermally destabilizing nucleotide is in the seed region of the antisense strand (i.e., at position 2-9 of the 5′-end of the antisense strand), and wherein the dsRNA optionally further has at least one (e.g., one, two, three, four, five, six, seven or all eight) of the following characteristics: (i) the antisense comprises 2, 3, 4, 5 or 6 2′-fluoro modifications; (ii) the antisense comprises 1, 2, 3, 4 or 5 phosphorothioate internucleotide linkages; (iii) the sense strand is conjugated with a ligand; (iv) the sense strand comprises 2, 3, 4 or 5 2′-fluoro modifications; (v) the sense strand comprises 1, 2, 3, 4 or 5 phosphorothioate internucleotide linkages; (vi) the dsRNA comprises at least four 2′-fluoro modifications; (vii) the dsRNA comprises a duplex region of 18, 19, 20, 21, 22, 23, 24 or 24 nucleotide pairs in length; and (viii) the dsRNA comprises a blunt end at 5′-end of the sense strand, wherein the destabilizing modification is selected from mUNA and GNA building blocks described in Examples 1-3 herein. In some embodiments, the destabilizing modification is selected from the group consisting of GNA-isoC, GNA-isoG, 5′-mUNA, 4′-mUNA, 3′-mUNA, and 2′-mUNA. In some further embodiments of this, the dsRNA molecule further comprises at least one thermally destabilizing modification selected from the group consisting of GNA, 2′-OMe, 3′-OMe, 5′-Me, Hy p-spacer, SNA, hGNA, hhGNA, mGNA, TNA and h′GNA (Mod A-Mod K). In some particular embodiments, sense strand is 19, 20 or 21 or 22 nucleotides in length and the antisense strand is 20, 21 or 22 nucleotides in length.

[0396] The sense strand and antisense strand typically form a duplex dsRNA. The duplex region of a dsRNA molecule may be 12-40 nucleotide pairs in length. For example, the duplex region can be between 14-40 nucleotide pairs in length, 17-30 nucleotide pairs in length, 25-35 nucleotides in length, 27-35 nucleotide pairs in length, 17-23 nucleotide pairs in length, 17-21 nucleotide pairs in length, 17-19 nucleotide pairs in length, 19-25 nucleotide pairs in length, 19-23 nucleotide pairs in length, 19-21 nucleotide pairs in length, 21-25 nucleotide pairs in length, or 21-23 nucleotide pairs in length. In another example, the duplex region is selected from 15, 16, 17, 18, 19, 20, 21, 22, 23, 24, 25, 26, and 27 nucleotide pairs in length.

[0397] In some embodiments, the dsRNA molecule of the invention has a duplex region of 12-40 nucleotides pairs in length, wherein the antisense strand contains at least one thermally destabilizing nucleotide, and where the at least one thermally destabilizing nucleotide is in the seed region of the antisense strand (i.e., at position 2-9 of the 5′-end of the antisense strand), and wherein the dsRNA optionally further has at least one (e.g., one, two, three, four, five, six or all seven) of the following characteristics: (i) the antisense comprises 2, 3, 4, 5 or 6 2′-fluoro modifications; (ii) the antisense comprises 1, 2, 3, 4 or 5 phosphorothioate internucleotide linkages; (iii) the sense strand is conjugated with a ligand; (iv) the sense strand comprises 2, 3, 4 or 5 2′-fluoro modifications; (v) the sense strand comprises 1, 2, 3, 4 or 5 phosphorothioate internucleotide linkages; and (vi) the dsRNA comprises at least four 2′-fluoro modifications; and (vii) the dsRNA comprises a blunt end at 5′-end of the antisense strand, wherein the destabilizing modification is selected from mUNA and GNA building blocks described in Examples 1-3 herein. In some embodiments, the destabilizing modification is selected from the group consisting of GNA-isoC, GNA-isoG, 5′-mUNA, 4′-mUNA, 3′-mUNA, and 2′-mUNA. In some further embodiments of this, the dsRNA molecule further comprises at least one thermally destabilizing modification selected from the group consisting of GNA, 2′-OMe, 3′-OMe, 5′-Me, Hy p-spacer, SNA, hGNA, hhGNA, mGNA, TNA and h′GNA (Mod A-Mod K). In some particular embodiments, the duplex region is 18, 19, 20, 21, 22 or 23 nucleotides pairs in length. In a particular embodiment, the duplex region is 21 nucleotide pairs in length.

[0398] In some embodiments, the dsRNA molecule of the invention comprises one or more overhang regions and/or capping groups of dsRNA molecule at the 3′-end, or 5′-end or both ends of a strand. The overhang can be 1-10 nucleotides in length, 1-6 nucleotides in length, for instance 2-6 nucleotides in length, 1-5 nucleotides in length, 2-5 nucleotides in length, 1-4 nucleotides in length, 2-4 nucleotides in length, 1-3 nucleotides in length, 2-3 nucleotides in length, or 1-2 nucleotides in length. The overhangs can be the result of one strand being longer than the other, or the result of two strands of the same length being staggered. The overhang can form a mismatch with the target mRNA or it can be complementary to the gene sequences being targeted or can be other sequence. The first and second strands can also be joined, e.g., by additional bases to form a hairpin, or by other non-base linkers.

[0399] In some embodiments, the nucleotides in the overhang region of the dsRNA molecule of the invention can each independently be a modified or unmodified nucleotide including, but not limited to 2′-sugar modified, such as, 2′-Fluoro 2′-O-methyl, thymidine (T), 2′-O-methoxyethyl-5-methyluridine, 2′-O-methoxyethyladenosine, 2′-O-methoxyethyl-5-methylcytidine, GNA, SNA, hGNA, hhGNA, mGNA, TNA, h′GNA, and any combinations thereof. For example, TT can be an overhang sequence for either end on either strand. The overhang can form a mismatch with the target mRNA or it can be complementary to the gene sequences being targeted or can be other sequence.

[0400] The 5′- or 3′-overhangs at the sense strand, antisense strand or both strands of the dsRNA molecule of the invention may be phosphorylated. In some embodiments, the overhang region contains two nucleotides having a phosphorothioate between the two nucleotides, where the two nucleotides can be the same or different. In some embodiments, the overhang is present at the 3′-end of the sense strand, antisense strand or both strands. In some embodiments, this 3′-overhang is present in the antisense strand. In some embodiments, this 3′-overhang is present in the sense strand.

[0401] The dsRNA molecule of the invention may comprise only a single overhang, which can strengthen the interference activity of the dsRNA, without affecting its overall stability. For example, the single-stranded overhang is located at the 3′-terminal end of the sense strand or, alternatively, at the 3′-terminal end of the antisense strand. The dsRNA may also have a blunt end, located at the 5′-end of the antisense strand (or the 3′-end of the sense strand) or vice versa. Generally, the antisense strand of the dsRNA has a nucleotide overhang at the 3′-end, and the 5′-end is blunt. While not bound by theory, the asymmetric blunt end at the 5′-end of the antisense strand and 3′-end overhang of the antisense strand favor the guide strand loading into RISC process. For example the single overhang comprises at least two, three, four, five, six, seven, eight, nine, or ten nucleotides in length. In some embodiments, the dsRNA has a 2 nucleotide overhang on the 3′-end of the antisense strand and a blunt end at the 5′-end of the antisense strand.

[0402] In some embodiments, one end of the dsRNA is a blunt end and the other end has an overhang, wherein the antisense strand contains at least one thermally destabilizing nucleotide, and where the at least one thermally destabilizing nucleotide is in the seed region of the antisense strand (i.e., at position 2-9 of the 5′-end of the antisense strand), and wherein the dsRNA optionally further has at least one (e.g., one, two, three, four, five, six or all seven) of the following characteristics: (i) the antisense comprises 2, 3, 4, 5 or 6 2′-fluoro modifications; (ii) the antisense comprises 1, 2, 3, 4 or 5 phosphorothioate internucleotide linkages; (iii) the sense strand is conjugated with a ligand; (iv) the sense strand comprises 2, 3, 4 or 5 2′-fluoro modifications; (v) the sense strand comprises 1, 2, 3, 4 or 5 phosphorothioate internucleotide linkages; (vi) the dsRNA comprises at least four 2′-fluoro modifications; (vii) and the dsRNA comprises a duplex region of 12-40 nucleotide pairs in length, wherein the destabilizing modification is selected from mUNA and GNA building blocks described in Examples 1-3 herein. In some embodiments, the destabilizing modification is selected from the group consisting of GNA-isoC, GNA-isoG, 5′-mUNA, 4′-mUNA, 3′-mUNA, and 2′-mUNA. In some further embodiments of this, the dsRNA molecule further comprises at least one thermally destabilizing modification selected from the group consisting of GNA, 2′-OMe, 3′-OMe, 5′-Me, Hy p-spacer, SNA, hGNA, hhGNA, mGNA, TNA and h′GNA (Mod A-Mod K). In some embodiments, the overhang is on the 3′-end of the antisense strand and the blunt end is at the 5′-end of the antisense strand. In some particular embodiments, the overhang is 2, 3 or 4-nucleotides in length.

[0403] In some embodiments, the dsRNA molecule has a duplex region of 19, 20, 21, 22 or 23 nucleotide base pairs in length, wherein one end of the dsRNA is a blunt end and the other end has an overhang, wherein the antisense strand contains at least one thermally destabilizing modification of the duplex located in the seed region of the antisense strand (i.e., at position 2-9 of the 5′-end of the antisense strand), and wherein the dsRNA optionally further has at least one (e.g., one, two, three, five or all six) of the following characteristics: (i) the antisense comprises 2, 3, 4, 5 or 6 2′-fluoro modifications; (ii) the antisense comprises 1, 2, 3, 4 or 5 phosphorothioate internucleotide linkages; (iii) the sense strand is conjugated with a ligand; (iv) the sense strand comprises 2, 3, 4 or 5 2′-fluoro modifications; (v) the sense strand comprises 1, 2, 3, 4 or 5 phosphorothioate internucleotide linkages; and (vi) the dsRNA comprises at least four 2′-fluoro modifications, and optionally the 2 nucleotide overhang is on the 3′-end of the antisense strand and the blunt end is at the 5′-end of the antisense strand, wherein the destabilizing modification is selected from mUNA and GNA building blocks described in Examples 1-3 herein. In some embodiments, the destabilizing modification is selected from the group consisting of GNA-isoC, GNA-isoG, 5′-mUNA, 4′-mUNA, 3′-mUNA, and 2′-mUNA. In some further embodiments of this, the dsRNA molecule further comprises at least one thermally destabilizing modification selected from the group consisting of GNA, 2′-OMe, 3′-OMe, 5′-Me, Hy p-spacer, SNA, hGNA, hhGNA, mGNA, TNA and h′GNA (Mod A-Mod K). In some embodiments, the overhang is on the 3′-end of the antisense strand and the blunt end is at the 5′-end of the antisense strand.

[0404] In some embodiments, the dsRNA molecule of the invention may also have two blunt ends, at both ends of the dsRNA duplex.

[0405] In some embodiments, the dsRNA has a blunt end at both ends of the duplex, wherein the antisense strand contains at least one thermally destabilizing nucleotide, and where the at least one thermally destabilizing nucleotide is in the seed region of the antisense strand (i.e., at position 2-9 of the 5′-end of the antisense strand), and wherein the dsRNA optionally further has at least one (e.g., one, two, three, four, five, six or all seven) of the following characteristics: (i) the antisense comprises 2, 3, 4, 5 or 6 2′-fluoro modifications; (ii) the antisense comprises 1, 2, 3, 4 or 5 phosphorothioate internucleotide linkages; (iii) the sense strand is conjugated with a ligand; (iv) the sense strand comprises 2, 3, 4 or 5 2′-fluoro modifications; (v) the sense strand comprises 1, 2, 3, 4 or 5 phosphorothioate internucleotide linkages; (vi) the dsRNA comprises at least four 2′-fluoro modifications; and (vii) the dsRNA comprises a duplex region of 12-40 nucleotide pairs in length, wherein the destabilizing modification is selected from mUNA and GNA building blocks described in Examples 1-3 herein. In some embodiments, the destabilizing modification is selected from the group consisting of GNA-isoC, GNA-isoG, 5′-mUNA, 4′-mUNA, 3′-mUNA, and 2′-mUNA. In some further embodiments of this, the dsRNA molecule further comprises at least one thermally destabilizing modification selected from the group consisting of GNA, 2′-OMe, 3′-OMe, 5′-Me, Hy p-spacer, SNA, hGNA, hhGNA, mGNA, TNA and h′GNA (Mod A-Mod K).

[0406] In some embodiments, the dsRNA molecule has a duplex region of 19, 20, 21, 22 or 23 nucleotide base pairs in length and has a blunt end at both ends of the duplex, wherein one end of the dsRNA is a blunt end and the other end has an overhang, wherein the antisense strand contains at least one thermally destabilizing modification of the duplex located in the seed region of the antisense strand (i.e., at position 2-9 of the 5′-end of the antisense strand), and wherein the dsRNA optionally further has at least one (e.g., one, two, three, five or all six) of the following characteristics: (i) the antisense comprises 2, 3, 4, 5 or 6 2′-fluoro modifications; (ii) the antisense comprises 1, 2, 3, 4 or 5 phosphorothioate internucleotide linkages; (iii) the sense strand is conjugated with a ligand; (iv) the sense strand comprises 2, 3, 4 or 5 2′-fluoro modifications; (v) the sense strand comprises 1, 2, 3, 4 or 5 phosphorothioate internucleotide linkages; and (vi) the dsRNA comprises at least four 2′-fluoro modifications, wherein the destabilizing modification is selected from mUNA and GNA building blocks described in Examples 1-3 herein. In some embodiments, the destabilizing modification is selected from the group consisting of GNA-isoC, GNA-isoG, 5′-mUNA, 4′-mUNA, 3′-mUNA, and 2′-mUNA. In some further embodiments of this, the dsRNA molecule further comprises at least one thermally destabilizing modification selected from the group consisting of GNA, 2′-OMe, 3′-OMe, 5′-Me, Hy p-spacer, SNA, hGNA, hhGNA, mGNA, TNA and h′GNA (Mod A-Mod K).

### Thermally Destabilizing Modifications.

[0407] As noted above, dsRNA molecule can be optimized for RNA interference by incorporating thermally destabilizing modifications in the seed region of the antisense strand (i.e., at positions 2-9 of the 5′-end of the antisense strand) to reduce or inhibit off-target gene silencing. Inventors have discovered that dsRNAs with an antisense strand comprising at least one thermally destabilizing modification of the duplex within the first 9 nucleotide positions, counting from the 5′ end, of the antisense strand have reduced off-target gene silencing activity. Accordingly, in some embodiments, the antisense strand comprises at least one (e.g., one, two, three, four, five or more) thermally destabilizing modification of the duplex within the first 9 nucleotide positions of the 5′ region of the antisense strand. In some embodiments, thermally destabilizing modification of the duplex is located in positions 2-9, or preferably positions 4-8, from the 5′-end of the antisense strand. In some further embodiments, the thermally destabilizing modification of the duplex is located at position 6, 7 or 8 from the 5′-end of the antisense strand.

[0408] In still some further embodiments, the thermally destabilizing modification of the duplex is located at position 7 from the 5′-end of the antisense strand. The term “thermally destabilizing modification(s)” includes modification(s) that would result with a dsRNA with a lower overall melting temperature (Tₘ) (preferably a Tₘ with one, two, three or four degrees lower than the Tₘ of the dsRNA without having such modification(s). In some embodiments, the thermally destabilizing modification of the duplex is located at position 2, 3, 4, 5 or 9 from the 5′-end of the antisense strand.

[0409] The thermally destabilizing modifications can include, but are not limited to, abasic modification; mismatch with the opposing nucleotide in the opposing strand; and sugar modification such as 2′-deoxy modification or acyclic nucleotide, e.g., unlocked nucleic acids (UNA) or glycol nucleic acid (GNA). For example, the thermally destabilizing modifications can include, but are not limited to, mUNA and GNA building blocks described in Examples 1-3 herein. In some embodiments, the destabilizing modification is selected from the group consisting of GNA-isoC, GNA-isoG, 5′-mUNA, 4′-mUNA, 3′-mUNA, and 2′-mUNA.

[0410] In some embodiments, the destabilizing modification mUNA is selected from the group consisting of

[chemical structure]

### Wherein:

[0411] R is H, OH; OMe; Cl, F; OH; O—(CH₂)₂OMe; SMe, NMe₂; NH₂; Me; CCH (alkyne), O-nPr; O-alkyl; or O-alkylamino;
[0412] R′ is H or Me;
[0413] B is A; C; 5-Me-C; G; I; U; T; Y; 2-thiouridine; 4-thiouridine; C5-modified pyrimidines; C2-modified purines; N8-modified purines; phenoxazine; G-clamp; non-canonical mono, bi and tricyclic heterocycles; pseudouracil; isoC; isoG; 2,6-diaminopurine; pseudocytosine; 2-aminopurine; xanthosine; N6-alkyl-A; O6-alkyl-G; 2-thiouridine; 4-thiouridine; C5-modified pyrimidines; C2-modified purines; N8-modified purines; 7-deazapurines, phenoxazine; G-clamp; or non-canonical mono, bi and tricyclic heterocycles; and
[0414] Stereochemistry is R or S and combination of R and S for the unspecified chiral centers.

[0415] In some embodiments, the destabilizing modification mUNA is selected from the group consisting of

[chemical structure]

### Wherein:

[0416] R is H, OH; OMe; Cl, F; OH; O—(CH₂)₂OMe; SMe, NMe₂; NH₂; Me; CCH (alkyne), O-nPr; O-alkyl; or O-alkylamino;
[0417] R′ is H or Me;
[0418] B is A; C; 5-Me-C; G; I; U; T; Y; 2-thiouridine; 4-thiouridine; C5-modified pyrimidines; C2-modified purines; N8-modified purines; phenoxazine; G-clamp; non-canonical mono, bi and tricyclic heterocycles; pseudouracil; isoC; isoG; 2,6-diaminopurine; pseudocytosine; 2-aminopurine; xanthosine; N6-alkyl-A; O6-alkyl-G; 2-thiouridine; 4-thiouridine; C5-modified pyrimidines; C2-modified purines; N8-modified purines; 7-deazapurines, phenoxazine; G-clamp; or non-canonical mono, bi and tricyclic heterocycles; and
[0419] Stereochemistry is R or S and combination of R and S for the unspecified chiral centers.

[0420] In some embodiments, the destabilizing modification mUNA is selected from the group consisting of

[chemical structure]

### Wherein:

[0421] R is H, OMe; F; OH; O—(CH₂)₂OMe; SMe, NMe₂; NH₂; Me; O-nPr; O-alkyl; or O-alkylamino;
[0422] R′ is H or Me;
[0423] B is A; C; 5-Me-C; G; I; U; T; Y; 2-thiouridine; 4-thiouridine; C5-modified pyrimidines; C2-modified purines; N8-modified purines; phenoxazine; G-clamp; non-canonical mono, bi and tricyclic heterocycles; pseudouracil; isoC; isoG; 2,6-diaminopurine; pseudocytosine; 2-aminopurine; xanthosine; N6-alkyl-A; O6-alkyl-G; or 7-deazapurines; and Stereochemistry is R or S and combination of R and S for the unspecified chiral centers.

[0424] In some embodiments, the destabilizing modification mUNA is selected from the group consisting of

[chemical structure]

### Wherein:

[0425] R is H, OH; OMe; Cl, F; OH; O—(CH₂)₂OMe; SMe, NMe₂; NH₂; Me; CCH (alkyne), O-nPr; O-alkyl; or O-alkylamino;
[0426] R′ is H or Me;
[0427] B is A; C; 5-Me-C; G; I; U; T; Y; 2-thiouridine; 4-thiouridine; C5-modified pyrimidines; C2-modified purines; N8-modified purines; phenoxazine; G-clamp; non-canonical mono, bi and tricyclic heterocycles; pseudouracil; isoC; isoG; 2,6-diaminopurine; pseudocytosine; 2-aminopurine; xanthosine; N6-alkyl-A; O6-alkyl-G; 2-thiouridine; 4-thiouridine; C5-modified pyrimidines; C2-modified purines; N8-modified purines; 7-deazapurines, phenoxazine; G-clamp; or non-canonical mono, bi and tricyclic heterocycles; and
[0428] Stereochemistry is R or S and combination of R and S for the unspecified chiral centers

[0429] In some embodiments, the destabilizing modification mUNA is selected from the group consisting of

[chemical structure]

### Wherein:

[0430] R is H, OH; OMe; Cl, F; OH; O—(CH₂)₂OMe; SMe, NMe₂; NH₂; Me; CCH (alkyne), O-nPr; O-alkyl; or O-alkylamino;
[0431] R′ is H or Me;
[0432] B is A; C; 5-Me-C; G; I; U; T; Y; 2-thiouridine; 4-thiouridine; C5-modified pyrimidines; C2-modified purines; N8-modified purines; phenoxazine; G-clamp; non-canonical mono, bi and tricyclic heterocycles; pseudouracil; isoC; isoG; 2,6-diaminopurine; pseudocytosine; 2-aminopurine; xanthosine; N6-alkyl-A; O6-alkyl-G; 2-thiouridine; 4-thiouridine; C5-modified pyrimidines; C2-modified purines; N8-modified purines; 7-deazapurines, phenoxazine; G-clamp; or non-canonical mono, bi and tricyclic heterocycles; and
[0433] Stereochemistry is R or S and combination of R and S for the unspecified chiral centers

[0434] In some embodiments, the modification mUNA is selected from the group consisting of

[chemical structure]

### Wherein:

[0435] R is H, OMe; F; OH; O—(CH₂)₂OMe; SMe, NMe₂; NH₂; Me; O-nPr; O-alkyl; or O-alkylamino;
[0436] R′ is H or Me;
[0437] B is A; C; 5-Me-C; G; I; U; T; Y; 2-thiouridine; 4-thiouridine; C5-modified pyrimidines; C2-modified purines; N8-modified purines; phenoxazine; G-clamp; non-canonical mono, bi and tricyclic heterocycles; pseudouracil; isoC; isoG; 2,6-diaminopurine; pseudocytosine; 2-aminopurine; xanthosine; N6-alkyl-A; O6-alkyl-G; or 7-deazapurines; and
[0438] Stereochemistry is R or S and combination of R and S for the unspecified chiral centers

[0439] In some embodiments, the modification mUNA is selected from the group consisting of

[chemical structure]

[0440] R₁, R₂=OTBS; F, H, Me, Cl
[0441] B=A^{Bz}; C^{Bz}; 5-Me-C^{Bz}; G; I; U; T; Y; 2-thiouridine; 4-thiouridine; C5-modified pyrimidines; C2-modified purines; N8-modified purines; phenoxazine; G-clamp; non-canonical mono, bi and tricyclic heterocycles; pseudouracil isoC; isoG; 2,6-diaminopurine; pseudocytosine; 2-aminopurine; xanthosine; N6-alkyl-A; O6-alkyl-G; 7-deazapurines

[chemical structure]

[chemical structure]

[chemical structure]

[chemical structure]

[chemical structure]

[0442] R₁, R₂=OTBS; F, H, Me, Cl
[0443] R₃=H, Me
[0444] B=A^{Bz}; C^{Bz}; 5-Me-C^{Bz}; G; I; U; T; Y; 2-thiouridine; 4-thiouridine; O5-modified pyrimidines; C2-modified purines; N8-modified purines; phenoxazine; G-clamp; non-canonical mono, bi and tricyclic heterocycles; pseudouracil isoC; isoG; 2,6-diaminopurine; pseudocytosine; 2-aminopurine; xanthosine; N6-alkyl-A; O6-alkyl-G; 7-deazapurines
   [0445] X=DMTr,

[chemical structure]

[chemical structure]

[chemical structure]

[0446] Exemplified abasic modifications include, but are not limited to the following:

[chemical structure]

[0447] Wherein R is H, Me, Et or OMe; R′ is H, Me, Et or OMe; and R″ is H, Me, Et or OMe

[chemical structure]

wherein B is a modified or unmodified nucleobase and the asterisk on each structure represents either R, S or racemic.

[0448] Exemplified sugar modifications include, but are not limited to the following:

[chemical structure]

wherein B is a modified or unmodified nucleobase and the asterisk on each structure represents either R, S or racemic.

[0449] In some embodiments the thermally destabilizing modification of the duplex is selected from the mUNA and GNA building blocks described in Examples 1-3 herein. In some embodiments, the destabilizing modification is selected from the group consisting of GNA-isoC, GNA-isoG, 5′-mUNA, 4′-mUNA, 3′-mUNA, and 2′-mUNA. In some further embodiments of this, the dsRNA molecule further comprises at least one thermally destabilizing modification selected from the group consisting of GNA, 2′-OMe, 3′-OMe, 5′-Me, Hy p-spacer, SNA, hGNA, hhGNA, mGNA, TNA and h′GNA (Mod A-Mod K).

[0450] The term “acyclic nucleotide” refers to any nucleotide having an acyclic ribose sugar, for example, where any of bonds between the ribose carbons (e.g., C1′-C2′, C2′-C3′, C3′-C4′, C4′-O4′, or C1′-O4′) is absent and/or at least one of ribose carbons or oxygen (e.g., C1′, C2′, C3′, C4′ or O4′) are independently or in combination absent from the nucleotide. In some embodiments, acyclic nucleotide is

[chemical structure]

wherein B is a modified or unmodified nucleobase, R1 and R2 independently are H, halogen, OR3, or alkyl; and R3 is H, alkyl, cycloalkyl, aryl, aralkyl, heteroaryl or sugar). The term “UNA” refers to unlocked acyclic nucleic acid, wherein any of the bonds of the sugar has been removed, forming an unlocked “sugar” residue. In one example, UNA also encompasses monomers with bonds between C1′-C4′ being removed (i.e. the covalent carbon-oxygen-carbon bond between the C1′ and C4′ carbons). In another example, the C2′-C3′ bond (i.e. the covalent carbon-carbon bond between the C2′ and C3′ carbons) of the sugar is removed (see Mikhailov et. al., Tetrahedron Letters, 26 (17): 2059 (1985); and Fluiter et al., Mol. Biosyst., 10: 1039 (2009), which are hereby incorporated by reference in their entirety). The acyclic derivative provides greater backbone flexibility without affecting the Watson-Crick pairings. The acyclic nucleotide can be linked via 2′-5′ or 3′-5′ linkage.

[0451] The term ‘GNA’ refers to glycol nucleic acid which is a polymer similar to DNA or RNA but differing in the composition of its “backbone” in that is composed of repeating glycerol units linked by phosphodiester bonds:

[chemical structure]

[0452] The thermally destabilizing modification of the duplex can be mismatches (i.e., noncomplementary base pairs) between the thermally destabilizing nucleotide and the opposing nucleotide in the opposite strand within the dsRNA duplex. Exemplary mismatch base pairs include G:G, G:A, G:U, G:T, A:A, A:C, C:C, C:U, C:T, U:U, T:T, U:T, or a combination thereof. Other mismatch base pairings known in the art are also amenable to the present invention. A mismatch can occur between nucleotides that are either naturally occurring nucleotides or modified nucleotides, i.e., the mismatch base pairing can occur between the nucleobases from respective nucleotides independent of the modifications on the ribose sugars of the nucleotides. In certain embodiments, the dsRNA molecule contains at least one nucleobase in the mismatch pairing that is a 2′-deoxy nucleobase; e.g., the 2′-deoxy nucleobase is in the sense strand.

[0453] In some embodiments, the thermally destabilizing modification of the duplex in the seed region of the antisense strand includes nucleotides with impaired W—C H-bonding to complementary base on the target mRNA, such as:

[chemical structure]

[0454] More examples of abasic nucleotide, acyclic nucleotide modifications (including UNA and GNA), and mismatch modifications have been described in detail in WO 2011/133876, which is herein incorporated by reference in its entirety.

[0455] The thermally destabilizing modifications may also include universal base with reduced or abolished capability to form hydrogen bonds with the opposing bases, and phosphate modifications.

[0456] In some embodiments, the thermally destabilizing modification of the duplex includes nucleotides with non-canonical bases such as, but not limited to, nucleobase modifications with impaired or completely abolished capability to form hydrogen bonds with bases in the opposite strand. These nucleobase modifications have been evaluated for destabilization of the central region of the dsRNA duplex as described in WO 2010/0011895, which is herein incorporated by reference in its entirety. Exemplary nucleobase modifications are:

[chemical structure]

[0457] In some embodiments, the thermally destabilizing modification of the duplex in the seed region of the antisense strand includes one or more α-nucleotide complementary to the base on the target mRNA, such as:

[chemical structure]

Wherein R is H, OH, OCH₃, F, NH₂, NHMe, NMe₂ or O-alkyl

[0458] Exemplary phosphate modifications known to decrease the thermal stability of dsRNA duplexes compared to natural phosphodiester linkages are:

[chemical structure]

[0459] The alkyl for the R group can be a C₁-C₆alkyl. Specific alkyls for the R group include, but are not limited to methyl, ethyl, propyl, isopropyl, butyl, pentyl and hexyl.

[0460] In some embodiments, exemplary destabilizing modifications shown in FIG. 1.

[0461] In addition to the antisense strand comprising a thermally destabilizing modification, the dsRNA can also comprise one or more stabilizing modifications. For example, the dsRNA can comprise at least two (e.g., two, three, four, five, six, seven, eight, nine, ten or more) stabilizing modifications. Without limitations, the stabilizing modifications all can be present in one strand. In some embodiments, both the sense and the antisense strands comprise at least two stabilizing modifications. The stabilizing modification can occur on any nucleotide of the sense strand or antisense strand. For instance, the stabilizing modification can occur on every nucleotide on the sense strand and/or antisense strand; each stabilizing modification can occur in an alternating pattern on the sense strand or antisense strand; or the sense strand or antisense strand comprises both stabilizing modification in an alternating pattern. The alternating pattern of the stabilizing modifications on the sense strand may be the same or different from the antisense strand, and the alternating pattern of the stabilizing modifications on the sense strand can have a shift relative to the alternating pattern of the stabilizing modifications on the antisense strand.

[0462] In some embodiments, the antisense strand comprises at least two (e.g., two, three, four, five, six, seven, eight, nine, ten or more) stabilizing modifications. Without limitations, a stabilizing modification in the antisense strand can be present at any positions. In some embodiments, the antisense comprises stabilizing modifications at positions 2, 6, 8, 9, 14 and 16 from the 5′-end. In some other embodiments, the antisense comprises stabilizing modifications at positions 2, 6, 14 and 16 from the 5′-end. Instill some other embodiments, the antisense comprises stabilizing modifications at positions 2, 14 and 16 from the 5′-end.

[0463] In some embodiments, the antisense strand comprises at least one stabilizing modification adjacent to the destabilizing modification. For example, the stabilizing modification can be the nucleotide at the 5′-end or the 3′-end of the destabilizing modification, i.e., at position −1 or +1 from the position of the destabilizing modification. In some embodiments, the antisense strand comprises a stabilizing modification at each of the 5′-end and the 3′-end of the destabilizing modification, i.e., positions −1 and +1 from the position of the destabilizing modification.

[0464] In some embodiments, the antisense strand comprises at least two stabilizing modifications at the 3′-end of the destabilizing modification, i.e., at positions+1 and +2 from the position of the destabilizing modification. In some embodiments, the sense strand comprises at least two (e.g., two, three, four, five, six, seven, eight, nine, ten or more) stabilizing modifications. Without limitations, a stabilizing modification in the sense strand can be present at any positions. In some embodiments, the sense strand comprises stabilizing modifications at positions 7, 10 and 11 from the 5′-end. In some other embodiments, the sense strand comprises stabilizing modifications at positions 7, 9, 10 and 11 from the 5′-end. In some embodiments, the sense strand comprises stabilizing modifications at positions opposite or complimentary to positions 11, 12 and 15 of the antisense strand, counting from the 5′-end of the antisense strand. In some other embodiments, the sense strand comprises stabilizing modifications at positions opposite or complimentary to positions 11, 12, 13 and 15 of the antisense strand, counting from the 5′-end of the antisense strand. In some embodiments, the sense strand comprises a block of two, three or four stabilizing modifications.

[0465] In some embodiments, the sense strand does not comprise a stabilizing modification in position opposite or complimentary to the thermally destabilizing modification of the duplex in the antisense strand.

[0466] Exemplary thermally stabilizing modifications include, but are not limited to 2′-fluoro modifications. Other thermally stabilizing modifications include, but are not limited to LNA.

[0467] In some embodiments, the dsRNA of the invention comprises at least four (e.g., four, five, six, seven, eight, nine, ten or more) 2′-fluoro nucleotides. Without limitations, the 2′-fluoro nucleotides all can be present in one strand. In some embodiments, both the sense and the antisense strands comprise at least two 2′-fluoro nucleotides. The 2′-fluoro modification can occur on any nucleotide of the sense strand or antisense strand. For instance, the 2′-fluoro modification can occur on every nucleotide on the sense strand and/or antisense strand; each 2′-fluoro modification can occur in an alternating pattern on the sense strand or antisense strand; or the sense strand or antisense strand comprises both 2′-fluoro modifications in an alternating pattern. The alternating pattern of the 2′-fluoro modifications on the sense strand may be the same or different from the antisense strand, and the alternating pattern of the 2′-fluoro modifications on the sense strand can have a shift relative to the alternating pattern of the 2′-fluoro modifications on the antisense strand.

[0468] In some embodiments, the antisense strand comprises at least two (e.g., two, three, four, five, six, seven, eight, nine, ten or more) 2′-fluoro nucleotides. Without limitations, a 2′-fluoro modification in the antisense strand can be present at any positions. In some embodiments, the antisense comprises 2′-fluoro nucleotides at positions 2, 6, 8, 9, 14 and 16 from the 5′-end. In some other embodiments, the antisense comprises 2′-fluoro nucleotides at positions 2, 6, 14 and 16 from the 5′-end. In still some other embodiments, the antisense comprises 2′-fluoro nucleotides at positions 2, 14 and 16 from the 5′-end.

[0469] In some embodiments, the antisense strand comprises at least one 2′-fluoro nucleotide adjacent to the destabilizing modification. For example, the 2′-fluoro nucleotide can be the nucleotide at the 5′-end or the 3′-end of the destabilizing modification, i.e., at position −1 or +1 from the position of the destabilizing modification. In some embodiments, the antisense strand comprises a 2′-fluoro nucleotide at each of the 5′-end and the 3′-end of the destabilizing modification, i.e., positions −1 and +1 from the position of the destabilizing modification.

[0470] In some embodiments, the antisense strand comprises at least two 2′-fluoro nucleotides at the 3′-end of the destabilizing modification, i.e., at positions +1 and +2 from the position of the destabilizing modification.

[0471] In some embodiments, the sense strand comprises at least two (e.g., two, three, four, five, six, seven, eight, nine, ten or more) 2′-fluoro nucleotides. Without limitations, a 2′-fluoro modification in the sense strand can be present at any positions. In some embodiments, the antisense comprises 2′-fluoro nucleotides at positions 7, 10 and 11 from the 5′-end. In some other embodiments, the sense strand comprises 2′-fluoro nucleotides at positions 7, 9, 10 and 11 from the 5′-end. In some embodiments, the sense strand comprises 2′-fluoro nucleotides at positions opposite or complimentary to positions 11, 12 and 15 of the antisense strand, counting from the 5′-end of the antisense strand. In some other embodiments, the sense strand comprises 2′-fluoro nucleotides at positions opposite or complimentary to positions 11, 12, 13 and 15 of the antisense strand, counting from the 5′-end of the antisense strand. In some embodiments, the sense strand comprises a block of two, three or four 2′-fluoro nucleotides.

[0472] In some embodiments, the sense strand does not comprise a 2′-fluoro nucleotide in position opposite or complimentary to the thermally destabilizing modification of the duplex in the antisense strand.

[0473] In some embodiments, the dsRNA molecule of the invention comprises a 21 nucleotides (nt) sense strand and a 23 nucleotides (nt) antisense, wherein the antisense strand contains at least one thermally destabilizing nucleotide, where the at least one thermally destabilizing nucleotide occurs in the seed region of the antisense strand (i.e., at position 2-9 of the 5′-end of the antisense strand), wherein one end of the dsRNA is blunt, while the other end is comprises a 2 nt overhang, and wherein the dsRNA optionally further has at least one (e.g., one, two, three, four, five, six or all seven) of the following characteristics: (i) the antisense comprises 2, 3, 4, 5 or 6 2′-fluoro modifications; (ii) the antisense comprises 1, 2, 3, 4 or 5 phosphorothioate internucleotide linkages; (iii) the sense strand is conjugated with a ligand; (iv) the sense strand comprises 2, 3, 4 or 5 2′-fluoro modifications; (v) the sense strand comprises 1, 2, 3, 4 or 5 phosphorothioate internucleotide linkages; (vi) the dsRNA comprises at least four 2′-fluoro modifications; and (vii) the dsRNA comprises a blunt end at 5′-end of the antisense strand, wherein the destabilizing modification is selected from mUNA and GNA building blocks described in Examples 1-3 herein. In some embodiments, the destabilizing modification is selected from the group consisting of GNA-isoC, GNA-isoG, 5′-mUNA, 4′-mUNA, 3′-mUNA, and 2′-mUNA. In some further embodiments of this, the dsRNA molecule further comprises at least one thermally destabilizing modification selected from the group consisting of GNA, 2′-OMe, 3′-OMe, 5′-Me, Hy p-spacer, SNA, hGNA, hhGNA, mGNA, TNA and h′GNA (Mod A-Mod K). Preferably, the 2 nt overhang is at the 3′-end of the antisense.

[0474] In some embodiments, the dsRNA molecule of the invention comprising a sense and antisense strands, wherein: the sense strand is 25-30 nucleotide residues in length, wherein starting from the 5′ terminal nucleotide (position 1), positions 1 to 23 of said sense strand comprise at least 8 ribonucleotides; antisense strand is 36-66 nucleotide residues in length and, starting from the 3′ terminal nucleotide, at least 8 ribonucleotides in the positions paired with positions 1-23 of sense strand to form a duplex; wherein at least the 3′ terminal nucleotide of antisense strand is unpaired with sense strand, and up to 6 consecutive 3′ terminal nucleotides are unpaired with sense strand, thereby forming a 3′ single stranded overhang of 1-6 nucleotides; wherein the 5′ terminus of antisense strand comprises from 10-30 consecutive nucleotides which are unpaired with sense strand, thereby forming a 10-30 nucleotide single stranded 5′ overhang; wherein at least the sense strand 5′ terminal and 3′ terminal nucleotides are base paired with nucleotides of antisense strand when sense and antisense strands are aligned for maximum complementarity, thereby forming a substantially duplexed region between sense and antisense strands; and antisense strand is sufficiently complementary to a target RNA along at least 19 ribonucleotides of antisense strand length to reduce target gene expression when said double stranded nucleic acid is introduced into a mammalian cell; and wherein the antisense strand contains at least one thermally destabilizing nucleotide, where at least one thermally destabilizing nucleotide is in the seed region of the antisense strand (i.e. at position 2-9 of the 5′-end of the antisense strand wherein the destabilizing modification is selected from mUNA and GNA building blocks described in Examples 1-3 herein. In some embodiments, the destabilizing modification is selected from the group consisting of GNA-isoC, GNA-isoG, 5′-mUNA, 4′-mUNA, 3′-mUNA, and 2′-mUNA. In some further embodiments of this, the dsRNA molecule further comprises at least one thermally destabilizing modification selected from the group consisting of GNA, 2′-OMe, 3′-OMe, 5′-Me, Hy p-spacer, SNA, hGNA, hhGNA, mGNA, TNA and h′GNA (Mod A-Mod K). For example, the thermally destabilizing nucleotide occurs between positions opposite or complimentary to positions 14-17 of the 5′-end of the sense strand, and wherein the dsRNA optionally further has at least one (e.g., one, two, three, four, five, six or all seven) of the following characteristics: (i) the antisense comprises 2, 3, 4, 5 or 6 2′-fluoro modifications; (ii) the antisense comprises 1, 2, 3, 4 or 5 phosphorothioate internucleotide linkages; (iii) the sense strand is conjugated with a ligand; (iv) the sense strand comprises 2, 3, 4 or 5 2′-fluoro modifications; (v) the sense strand comprises 1, 2, 3, 4 or 5 phosphorothioate internucleotide linkages; and (vi) the dsRNA comprises at least four 2′-fluoro modifications; and (vii) the dsRNA comprises a duplex region of 12-30 nucleotide pairs in length.

[0475] In some embodiments, the dsRNA molecule of the invention comprises a sense and antisense strands, wherein said dsRNA molecule comprises a sense strand having a length which is at least 25 and at most 29 nucleotides and an antisense strand having a length which is at most 30 nucleotides with the sense strand comprises a modified nucleotide that is susceptible to enzymatic degradation at position 11 from the 5′end, wherein the 3′ end of said sense strand and the 5′ end of said antisense strand form a blunt end and said antisense strand is 1-4 nucleotides longer at its 3′ end than the sense strand, wherein the duplex region which is at least 25 nucleotides in length, and said antisense strand is sufficiently complementary to a target mRNA along at least 19 nt of said antisense strand length to reduce target gene expression when said dsRNA molecule is introduced into a mammalian cell, and wherein dicer cleavage of said dsRNA preferentially results in an siRNA comprising said 3′ end of said antisense strand, thereby reducing expression of the target gene in the mammal, wherein the antisense strand contains at least one thermally destabilizing nucleotide, where the at least one thermally destabilizing nucleotide is in the seed region of the antisense strand (i.e. at position 2-9 of the 5′-end of the antisense strand), and wherein the dsRNA optionally further has at least one (e.g., one, two, three, four, five, six or all seven) of the following characteristics: (i) the antisense comprises 2, 3, 4, 5 or 6 2′-fluoro modifications; (ii) the antisense comprises 1, 2, 3, 4 or 5 phosphorothioate internucleotide linkages; (iii) the sense strand is conjugated with a ligand; (iv) the sense strand comprises 2, 3, 4 or 5 2′-fluoro modifications; (v) the sense strand comprises 1, 2, 3, 4 or 5 phosphorothioate internucleotide linkages; and (vi) the dsRNA comprises at least four 2′-fluoro modifications; and (vii) the dsRNA has a duplex region of 12-29 nucleotide pairs in length, wherein the destabilizing modification is selected from mUNA and GNA building blocks described in Examples 1-3 herein. In some embodiments, the destabilizing modification is selected from the group consisting of GNA-isoC, GNA-isoG, 5′-mUNA, 4′-mUNA, 3′-mUNA, and 2′-mUNA. In some further embodiments of this, the dsRNA molecule further comprises at least one thermally destabilizing modification selected from the group consisting of GNA, 2′-OMe, 3′-OMe, 5′-Me, Hy p-spacer, SNA, hGNA, hhGNA, mGNA, TNA and h′GNA (Mod A-Mod K).

[0476] In some embodiments, every nucleotide in the sense strand and antisense strand of the dsRNA molecule may be modified. Each nucleotide may be modified with the same or different modification which can include one or more alteration of one or both of the non-linking phosphate oxygens and/or of one or more of the linking phosphate oxygens; alteration of a constituent of the ribose sugar, e.g., of the 2′ hydroxyl on the ribose sugar; wholesale replacement of the phosphate moiety with “dephospho” linkers; modification or replacement of a naturally occurring base; and replacement or modification of the ribose-phosphate backbone.

[0477] As nucleic acids are polymers of subunits, many of the modifications occur at a position which is repeated within a nucleic acid, e.g., a modification of a base, or a phosphate moiety, or a non-linking O of a phosphate moiety. In some cases the modification will occur at all of the subject positions in the nucleic acid but in many cases it will not. By way of example, a modification may only occur at a 3′ or 5′ terminal position, may only occur in a terminal region, e.g., at a position on a terminal nucleotide or in the last 2, 3, 4, 5, or 10 nucleotides of a strand. A modification may occur in a double strand region, a single strand region, or in both. A modification may occur only in the double strand region of a RNA or may only occur in a single strand region of a RNA. E.g., a phosphorothioate modification at a non-linking O position may only occur at one or both termini, may only occur in a terminal region, e.g., at a position on a terminal nucleotide or in the last 2, 3, 4, 5, or 10 nucleotides of a strand, or may occur in double strand and single strand regions, particularly at termini. The 5′ end or ends can be phosphorylated.

[0478] It may be possible, e.g., to enhance stability, to include particular bases in overhangs, or to include modified nucleotides or nucleotide surrogates, in single strand overhangs, e.g., in a 5′ or 3′ overhang, or in both. E.g., it can be desirable to include purine nucleotides in overhangs. In some embodiments all or some of the bases in a 3′ or 5′ overhang may be modified, e.g., with a modification described herein. Modifications can include, e.g., the use of modifications at the 2′ position of the ribose sugar with modifications that are known in the art, e.g., the use of deoxyribonucleotides, 2′-deoxy-2′-fluoro (2′-F) or 2′-O-methyl modified instead of the ribosugar of the nucleobase, and modifications in the phosphate group, e.g., phosphorothioate modifications. Overhangs need not be homologous with the target sequence.

[0479] In some embodiments, each residue of the sense strand and antisense strand is independently modified with LNA, HNA, CeNA, 2′-methoxyethyl, 2′-O-methyl, 2′-O-allyl, 2′-C-allyl, 2′-deoxy, or 2′-fluoro. The strands can contain more than one modification. In some embodiments, each residue of the sense strand and antisense strand is independently modified with 2′-O-methyl or 2′-fluoro. It is to be understood that these modifications are in addition to the at least one thermally destabilizing modification of the duplex present in the antisense strand.

[0480] At least two different modifications are typically present on the sense strand and antisense strand. Those two modifications may be the 2′-deoxy, 2′-O-methyl or 2′-fluoro modifications, acyclic nucleotides or others. In some embodiments, the sense strand and antisense strand each comprises two differently modified nucleotides selected from 2′-O-methyl or 2′-deoxy. In some embodiments, each residue of the sense strand and antisense strand is independently modified with 2′-O-methyl nucleotide, 2′-deoxy nucleotide, 2′-deoxy-2′-fluoro nucleotide, 2′-O—N-methylacetamido (2′-O-NMA) nucleotide, a 2′-O-dimethylaminoethoxyethyl (2′-O-DMAEOE) nucleotide, 2′-O-aminopropyl (2′-O-AP) nucleotide, or 2′-ara-F nucleotide. Again, it is to be understood that these modifications are in addition to the at least one thermally destabilizing modification of the duplex present in the antisense strand.

[0481] In some embodiments, the dsRNA molecule of the invention comprises modifications of an alternating pattern, particular in the B1, B2, B3, B1′, B2′, B3′, B4′ regions. The term “alternating motif” or “alternative pattern” as used herein refers to a motif having one or more modifications, each modification occurring on alternating nucleotides of one strand. The alternating nucleotide may refer to one per every other nucleotide or one per every three nucleotides, or a similar pattern. For example, if A, B and C each represent one type of modification to the nucleotide, the alternating motif can be “ABABABABABAB . . . ,” “AABBAABBAABB . . . ,” “AABAABAABAAB . . . ,” “AAABAAABAAAB . . . ,” “AAABBBAAABBB . . . ,” or “ABCABCABCABC . . . ,” etc.

[0482] The type of modifications contained in the alternating motif may be the same or different. For example, if A, B, C, D each represent one type of modification on the nucleotide, the alternating pattern, i.e., modifications on every other nucleotide, may be the same, but each of the sense strand or antisense strand can be selected from several possibilities of modifications within the alternating motif such as “ABABAB . . . ”, “ACACAC . . . ” “BDBDBD . . . ” or “CDCDCD . . . ,” etc.

[0483] In some embodiments, the dsRNA molecule of the invention comprises the modification pattern for the alternating motif on the sense strand relative to the modification pattern for the alternating motif on the antisense strand is shifted. The shift may be such that the modified group of nucleotides of the sense strand corresponds to a differently modified group of nucleotides of the antisense strand and vice versa. For example, the sense strand when paired with the antisense strand in the dsRNA duplex, the alternating motif in the sense strand may start with “ABABAB” from 5′-3′ of the strand and the alternating motif in the antisense strand may start with “BABABA” from 3′-5′ of the strand within the duplex region. As another example, the alternating motif in the sense strand may start with “AABBAABB” from 5′-3′ of the strand and the alternating motif in the antisense strand may start with “BBAABBAA” from 3′-5′ of the strand within the duplex region, so that there is a complete or partial shift of the modification patterns between the sense strand and the antisense strand.

[0484] The dsRNA molecule of the invention may further comprise at least one phosphorothioate or methylphosphonate internucleotide linkage. The phosphorothioate or methylphosphonate internucleotide linkage modification may occur on any nucleotide of the sense strand or antisense strand or both in any position of the strand. For instance, the internucleotide linkage modification may occur on every nucleotide on the sense strand and/or antisense strand; each internucleotide linkage modification may occur in an alternating pattern on the sense strand or antisense strand; or the sense strand or antisense strand comprises both internucleotide linkage modifications in an alternating pattern. The alternating pattern of the internucleotide linkage modification on the sense strand may be the same or different from the antisense strand, and the alternating pattern of the internucleotide linkage modification on the sense strand may have a shift relative to the alternating pattern of the internucleotide linkage modification on the antisense strand.

[0485] In some embodiments, the dsRNA molecule comprises the phosphorothioate or methylphosphonate internucleotide linkage modification in the overhang region. For example, the overhang region comprises two nucleotides having a phosphorothioate or methylphosphonate internucleotide linkage between the two nucleotides. Internucleotide linkage modifications also may be made to link the overhang nucleotides with the terminal paired nucleotides within duplex region. For example, at least 2, 3, 4, or all the overhang nucleotides may be linked through phosphorothioate or methylphosphonate internucleotide linkage, and optionally, there may be additional phosphorothioate or methylphosphonate internucleotide linkages linking the overhang nucleotide with a paired nucleotide that is next to the overhang nucleotide. For instance, there may be at least two phosphorothioate internucleotide linkages between the terminal three nucleotides, in which two of the three nucleotides are overhang nucleotides, and the third is a paired nucleotide next to the overhang nucleotide. Preferably, these terminal three nucleotides may be at the 3′-end of the antisense strand.

[0486] In some embodiments, the sense strand of the dsRNA molecule comprises 1-10 blocks of two to ten phosphorothioate or methylphosphonate internucleotide linkages separated by 1, 2, 3, 4, 5, 6, 7, 8, 9, 10, 11, 12, 13, 14, 15 or 16 phosphate internucleotide linkages, wherein one of the phosphorothioate or methylphosphonate internucleotide linkages is placed at any position in the oligonucleotide sequence and the said sense strand is paired with an antisense strand comprising any combination of phosphorothioate, methylphosphonate and phosphate internucleotide linkages or an antisense strand comprising either phosphorothioate or methylphosphonate or phosphate linkage.

[0487] In some embodiments, the antisense strand of the dsRNA molecule comprises two blocks of two phosphorothioate or methylphosphonate internucleotide linkages separated by 1, 2, 3, 4, 5, 6, 7, 8, 9, 10, 11, 12, 13, 14, 15, 16, 17, or 18 phosphate internucleotide linkages, wherein one of the phosphorothioate or methylphosphonate internucleotide linkages is placed at any position in the oligonucleotide sequence and the said antisense strand is paired with a sense strand comprising any combination of phosphorothioate, methylphosphonate and phosphate internucleotide linkages or an antisense strand comprising either phosphorothioate or methylphosphonate or phosphate linkage.

[0488] In some embodiments, the antisense strand of the dsRNA molecule comprises two blocks of three phosphorothioate or methylphosphonate internucleotide linkages separated by 1, 2, 3, 4, 5, 6, 7, 8, 9, 10, 11, 12, 13, 14, 15 or 16 phosphate internucleotide linkages, wherein one of the phosphorothioate or methylphosphonate internucleotide linkages is placed at any position in the oligonucleotide sequence and the said antisense strand is paired with a sense strand comprising any combination of phosphorothioate, methylphosphonate and phosphate internucleotide linkages or an antisense strand comprising either phosphorothioate or methylphosphonate or phosphate linkage.

[0489] In some embodiments, the antisense strand of the dsRNA molecule comprises two blocks of four phosphorothioate or methylphosphonate internucleotide linkages separated by 1, 2, 3, 4, 5, 6, 7, 8, 9, 10, 11, 12, 13 or 14 phosphate internucleotide linkages, wherein one of the phosphorothioate or methylphosphonate internucleotide linkages is placed at any position in the oligonucleotide sequence and the said antisense strand is paired with a sense strand comprising any combination of phosphorothioate, methylphosphonate and phosphate internucleotide linkages or an antisense strand comprising either phosphorothioate or methylphosphonate or phosphate linkage.

[0490] In some embodiments, the antisense strand of the dsRNA molecule comprises two blocks of five phosphorothioate or methylphosphonate internucleotide linkages separated by 1, 2, 3, 4, 5, 6, 7, 8, 9, 10, 11 or 12 phosphate internucleotide linkages, wherein one of the phosphorothioate or methylphosphonate internucleotide linkages is placed at any position in the oligonucleotide sequence and the said antisense strand is paired with a sense strand comprising any combination of phosphorothioate, methylphosphonate and phosphate internucleotide linkages or an antisense strand comprising either phosphorothioate or methylphosphonate or phosphate linkage.

[0491] In some embodiments, the antisense strand of the dsRNA molecule comprises two blocks of six phosphorothioate or methylphosphonate internucleotide linkages separated by 1, 2, 3, 4, 5, 6, 7, 8, 9 or 10 phosphate internucleotide linkages, wherein one of the phosphorothioate or methylphosphonate internucleotide linkages is placed at any position in the oligonucleotide sequence and the said antisense strand is paired with a sense strand comprising any combination of phosphorothioate, methylphosphonate and phosphate internucleotide linkages or an antisense strand comprising either phosphorothioate or methylphosphonate or phosphate linkage.

[0492] In some embodiments, the antisense strand of the dsRNA molecule comprises two blocks of seven phosphorothioate or methylphosphonate internucleotide linkages separated by 1, 2, 3, 4, 5, 6, 7 or 8 phosphate internucleotide linkages, wherein one of the phosphorothioate or methylphosphonate internucleotide linkages is placed at any position in the oligonucleotide sequence and the said antisense strand is paired with a sense strand comprising any combination of phosphorothioate, methylphosphonate and phosphate internucleotide linkages or an antisense strand comprising either phosphorothioate or methylphosphonate or phosphate linkage.

[0493] In some embodiments, the antisense strand of the dsRNA molecule comprises two blocks of eight phosphorothioate or methylphosphonate internucleotide linkages separated by 1, 2, 3, 4, 5 or 6 phosphate internucleotide linkages, wherein one of the phosphorothioate or methylphosphonate internucleotide linkages is placed at any position in the oligonucleotide sequence and the said antisense strand is paired with a sense strand comprising any combination of phosphorothioate, methylphosphonate and phosphate internucleotide linkages or an antisense strand comprising either phosphorothioate or methylphosphonate or phosphate linkage.

[0494] In some embodiments, the antisense strand of the dsRNA molecule comprises two blocks of nine phosphorothioate or methylphosphonate internucleotide linkages separated by 1, 2, 3 or 4 phosphate internucleotide linkages, wherein one of the phosphorothioate or methylphosphonate internucleotide linkages is placed at any position in the oligonucleotide sequence and the said antisense strand is paired with a sense strand comprising any combination of phosphorothioate, methylphosphonate and phosphate internucleotide linkages or an antisense strand comprising either phosphorothioate or methylphosphonate or phosphate linkage.

[0495] In some embodiments, the dsRNA molecule of the invention further comprises one or more phosphorothioate or methylphosphonate internucleotide linkage modification within 1-10 of the termini position(s) of the sense and/or antisense strand. For example, at least 2, 3, 4, 5, 6, 7, 8, 9 or 10 nucleotides may be linked through phosphorothioate or methylphosphonate internucleotide linkage at one end or both ends of the sense and/or antisense strand.

[0496] In some embodiments, the dsRNA molecule of the invention further comprises one or more phosphorothioate or methylphosphonate internucleotide linkage modification within 1-10 of the internal region of the duplex of each of the sense and/or antisense strand. For example, at least 2, 3, 4, 5, 6, 7, 8, 9 or 10 nucleotides may be linked through phosphorothioate methylphosphonate internucleotide linkage at position 8-16 of the duplex region counting from the 5′-end of the sense strand; the dsRNA molecule can optionally further comprise one or more phosphorothioate or methylphosphonate internucleotide linkage modification within 1-10 of the termini position(s).

[0497] In some embodiments, the dsRNA molecule of the invention further comprises one to five phosphorothioate or methylphosphonate internucleotide linkage modification(s) within position 1-5 and one to five phosphorothioate or methylphosphonate internucleotide linkage modification(s) within position 18-23 of the sense strand (counting from the 5′-end), and one to five phosphorothioate or methylphosphonate internucleotide linkage modification at positions 1 and 2 and one to five within positions 18-23 of the antisense strand (counting from the 5′-end).

[0498] In some embodiments, the dsRNA molecule of the invention further comprises one phosphorothioate internucleotide linkage modification within position 1-5 and one phosphorothioate or methylphosphonate internucleotide linkage modification within position 18-23 of the sense strand (counting from the 5′-end), and one phosphorothioate internucleotide linkage modification at positions 1 and 2 and two phosphorothioate or methylphosphonate internucleotide linkage modifications within positions 18-23 of the antisense strand (counting from the 5′-end).

[0499] In some embodiments, the dsRNA molecule of the invention further comprises two phosphorothioate internucleotide linkage modifications within position 1-5 and one phosphorothioate internucleotide linkage modification within position 18-23 of the sense strand (counting from the 5′-end), and one phosphorothioate internucleotide linkage modification at positions 1 and 2 and two phosphorothioate internucleotide linkage modifications within positions 18-23 of the antisense strand (counting from the 5′-end).

[0500] In some embodiments, the dsRNA molecule of the invention further comprises two phosphorothioate internucleotide linkage modifications within position 1-5 and two phosphorothioate internucleotide linkage modifications within position 18-23 of the sense strand (counting from the 5′-end), and one phosphorothioate internucleotide linkage modification at positions 1 and 2 and two phosphorothioate internucleotide linkage modifications within positions 18-23 of the antisense strand (counting from the 5′-end).

[0501] In some embodiments, the dsRNA molecule of the invention further comprises two phosphorothioate internucleotide linkage modifications within position 1-5 and two phosphorothioate internucleotide linkage modifications within position 18-23 of the sense strand (counting from the 5′-end), and one phosphorothioate internucleotide linkage modification at positions 1 and 2 and one phosphorothioate internucleotide linkage modification within positions 18-23 of the antisense strand (counting from the 5′-end).

[0502] In some embodiments, the dsRNA molecule of the invention further comprises one phosphorothioate internucleotide linkage modification within position 1-5 and one phosphorothioate internucleotide linkage modification within position 18-23 of the sense strand (counting from the 5′-end), and two phosphorothioate internucleotide linkage modifications at positions 1 and 2 and two phosphorothioate internucleotide linkage modifications within positions 18-23 of the antisense strand (counting from the 5′-end).

[0503] In some embodiments, the dsRNA molecule of the invention further comprises one phosphorothioate internucleotide linkage modification within position 1-5 and one within position 18-23 of the sense strand (counting from the 5′-end), and two phosphorothioate internucleotide linkage modification at positions 1 and 2 and one phosphorothioate internucleotide linkage modification within positions 18-23 of the antisense strand (counting from the 5′-end).

[0504] In some embodiments, the dsRNA molecule of the invention further comprises one phosphorothioate internucleotide linkage modification within position 1-5 (counting from the 5′-end) of the sense strand, and two phosphorothioate internucleotide linkage modifications at positions 1 and 2 and one phosphorothioate internucleotide linkage modification within positions 18-23 of the antisense strand (counting from the 5′-end).

[0505] In some embodiments, the dsRNA molecule of the invention further comprises two phosphorothioate internucleotide linkage modifications within position 1-5 (counting from the 5′-end) of the sense strand, and one phosphorothioate internucleotide linkage modification at positions 1 and 2 and two phosphorothioate internucleotide linkage modifications within positions 18-23 of the antisense strand (counting from the 5′-end).

[0506] In some embodiments, the dsRNA molecule of the invention further comprises two phosphorothioate internucleotide linkage modifications within position 1-5 and one within position 18-23 of the sense strand (counting from the 5′-end), and two phosphorothioate internucleotide linkage modifications at positions 1 and 2 and one phosphorothioate internucleotide linkage modification within positions 18-23 of the antisense strand (counting from the 5′-end).

[0507] In some embodiments, the dsRNA molecule of the invention further comprises two phosphorothioate internucleotide linkage modifications within position 1-5 and one phosphorothioate internucleotide linkage modification within position 18-23 of the sense strand (counting from the 5′-end), and two phosphorothioate internucleotide linkage modifications at positions 1 and 2 and two phosphorothioate internucleotide linkage modifications within positions 18-23 of the antisense strand (counting from the 5′-end).

[0508] In some embodiments, the dsRNA molecule of the invention further comprises two phosphorothioate internucleotide linkage modifications within position 1-5 and one phosphorothioate internucleotide linkage modification within position 18-23 of the sense strand (counting from the 5′-end), and one phosphorothioate internucleotide linkage modification at positions 1 and 2 and two phosphorothioate internucleotide linkage modifications within positions 18-23 of the antisense strand (counting from the 5′-end).

[0509] In some embodiments, the dsRNA molecule of the invention further comprises two phosphorothioate internucleotide linkage modifications at position 1 and 2, and two phosphorothioate internucleotide linkage modifications at position 20 and 21 of the sense strand (counting from the 5′-end), and one phosphorothioate internucleotide linkage modification at positions 1 and one at position 21 of the antisense strand (counting from the 5′-end).

[0510] In some embodiments, the dsRNA molecule of the invention further comprises one phosphorothioate internucleotide linkage modification at position 1, and one phosphorothioate internucleotide linkage modification at position 21 of the sense strand (counting from the 5′-end), and two phosphorothioate internucleotide linkage modifications at positions 1 and 2 and two phosphorothioate internucleotide linkage modifications at positions 20 and 21 the antisense strand (counting from the 5′-end).

[0511] In some embodiments, the dsRNA molecule of the invention further comprises two phosphorothioate internucleotide linkage modifications at position 1 and 2, and two phosphorothioate internucleotide linkage modifications at position 21 and 22 of the sense strand (counting from the 5′-end), and one phosphorothioate internucleotide linkage modification at positions 1 and one phosphorothioate internucleotide linkage modification at position 21 of the antisense strand (counting from the 5′-end).

[0512] In some embodiments, the dsRNA molecule of the invention further comprises one phosphorothioate internucleotide linkage modification at position 1, and one phosphorothioate internucleotide linkage modification at position 21 of the sense strand (counting from the 5′-end), and two phosphorothioate internucleotide linkage modifications at positions 1 and 2 and two phosphorothioate internucleotide linkage modifications at positions 21 and 22 the antisense strand (counting from the 5′-end).

[0513] In some embodiments, the dsRNA molecule of the invention further comprises two phosphorothioate internucleotide linkage modifications at position 1 and 2, and two phosphorothioate internucleotide linkage modifications at position 22 and 23 of the sense strand (counting from the 5′-end), and one phosphorothioate internucleotide linkage modification at positions 1 and one phosphorothioate internucleotide linkage modification at position 21 of the antisense strand (counting from the 5′-end).

[0514] In some embodiments, the dsRNA molecule of the invention further comprises one phosphorothioate internucleotide linkage modification at position 1, and one phosphorothioate internucleotide linkage modification at position 21 of the sense strand (counting from the 5′-end), and two phosphorothioate internucleotide linkage modifications at positions 1 and 2 and two phosphorothioate internucleotide linkage modifications at positions 23 and 23 the antisense strand (counting from the 5′-end).

[0515] In some embodiments, compound of the invention comprises a pattern of backbone chiral centers. In some embodiments, a common pattern of backbone chiral centers comprises at least 5 internucleotidic linkages in the Sp configuration. In some embodiments, a common pattern of backbone chiral centers comprises at least 6 internucleotidic linkages in the Sp configuration. In some embodiments, a common pattern of backbone chiral centers comprises at least 7 internucleotidic linkages in the Sp configuration. In some embodiments, a common pattern of backbone chiral centers comprises at least 8 internucleotidic linkages in the Sp configuration. In some embodiments, a common pattern of backbone chiral centers comprises at least 9 internucleotidic linkages in the Sp configuration. In some embodiments, a common pattern of backbone chiral centers comprises at least 10 internucleotidic linkages in the Sp configuration. In some embodiments, a common pattern of backbone chiral centers comprises at least 11 internucleotidic linkages in the Sp configuration. In some embodiments, a common pattern of backbone chiral centers comprises at least 12 internucleotidic linkages in the Sp configuration. In some embodiments, a common pattern of backbone chiral centers comprises at least 13 internucleotidic linkages in the Sp configuration. In some embodiments, a common pattern of backbone chiral centers comprises at least 14 internucleotidic linkages in the Sp configuration. In some embodiments, a common pattern of backbone chiral centers comprises at least 15 internucleotidic linkages in the Sp configuration. In some embodiments, a common pattern of backbone chiral centers comprises at least 16 internucleotidic linkages in the Sp configuration. In some embodiments, a common pattern of backbone chiral centers comprises at least 17 internucleotidic linkages in the Sp configuration. In some embodiments, a common pattern of backbone chiral centers comprises at least 18 internucleotidic linkages in the Sp configuration. In some embodiments, a common pattern of backbone chiral centers comprises at least 19 internucleotidic linkages in the Sp configuration. In some embodiments, a common pattern of backbone chiral centers comprises no more than 8 internucleotidic linkages in the Rp configuration. In some embodiments, a common pattern of backbone chiral centers comprises no more than 7 internucleotidic linkages in the Rp configuration. In some embodiments, a common pattern of backbone chiral centers comprises no more than 6 internucleotidic linkages in the Rp configuration. In some embodiments, a common pattern of backbone chiral centers comprises no more than 5 internucleotidic linkages in the Rp configuration. In some embodiments, a common pattern of backbone chiral centers comprises no more than 4 internucleotidic linkages in the Rp configuration. In some embodiments, a common pattern of backbone chiral centers comprises no more than 3 internucleotidic linkages in the Rp configuration. In some embodiments, a common pattern of backbone chiral centers comprises no more than 2 internucleotidic linkages in the Rp configuration. In some embodiments, a common pattern of backbone chiral centers comprises no more than 1 internucleotidic linkages in the Rp configuration. In some embodiments, a common pattern of backbone chiral centers comprises no more than 8 internucleotidic linkages which are not chiral (as a non-limiting example, a phosphodiester). In some embodiments, a common pattern of backbone chiral centers comprises no more than 7 internucleotidic linkages which are not chiral. In some embodiments, a common pattern of backbone chiral centers comprises no more than 6 internucleotidic linkages which are not chiral. In some embodiments, a common pattern of backbone chiral centers comprises no more than 5 internucleotidic linkages which are not chiral. In some embodiments, a common pattern of backbone chiral centers comprises no more than 4 internucleotidic linkages which are not chiral. In some embodiments, a common pattern of backbone chiral centers comprises no more than 3 internucleotidic linkages which are not chiral. In some embodiments, a common pattern of backbone chiral centers comprises no more than 2 internucleotidic linkages which are not chiral. In some embodiments, a common pattern of backbone chiral centers comprises no more than 1 internucleotidic linkages which are not chiral. In some embodiments, a common pattern of backbone chiral centers comprises at least 10 internucleotidic linkages in the Sp configuration, and no more than 8 internucleotidic linkages which are not chiral. In some embodiments, a common pattern of backbone chiral centers comprises at least 11 internucleotidic linkages in the Sp configuration, and no more than 7 internucleotidic linkages which are not chiral. In some embodiments, a common pattern of backbone chiral centers comprises at least 12 internucleotidic linkages in the Sp configuration, and no more than 6 internucleotidic linkages which are not chiral. In some embodiments, a common pattern of backbone chiral centers comprises at least 13 internucleotidic linkages in the Sp configuration, and no more than 6 internucleotidic linkages which are not chiral. In some embodiments, a common pattern of backbone chiral centers comprises at least 14 internucleotidic linkages in the Sp configuration, and no more than 5 internucleotidic linkages which are not chiral. In some embodiments, a common pattern of backbone chiral centers comprises at least 15 internucleotidic linkages in the Sp configuration, and no more than 4 internucleotidic linkages which are not chiral. In some embodiments, the internucleotidic linkages in the Sp configuration are optionally contiguous or not contiguous. In some embodiments, the internucleotidic linkages in the Rp configuration are optionally contiguous or not contiguous. In some embodiments, the internucleotidic linkages which are not chiral are optionally contiguous or not contiguous.

[0516] In some embodiments, compound of the invention comprises a block is a stereochemistry block. In some embodiments, a block is an Rp block in that each internucleotidic linkage of the block is Rp. In some embodiments, a 5′-block is an Rp block. In some embodiments, a 3′-block is an Rp block. In some embodiments, a block is an Sp block in that each internucleotidic linkage of the block is Sp. In some embodiments, a 5′-block is an Sp block. In some embodiments, a 3′-block is an Sp block. In some embodiments, provided oligonucleotides comprise both Rp and Sp blocks. In some embodiments, provided oligonucleotides comprise one or more Rp but no Sp blocks. In some embodiments, provided oligonucleotides comprise one or more Sp but no Rp blocks. In some embodiments, provided oligonucleotides comprise one or more PO blocks wherein each internucleotidic linkage in a natural phosphate linkage.

[0517] In some embodiments, compound of the invention comprises a 5′-block is an Sp block wherein each sugar moiety comprises a 2′-F modification. In some embodiments, a 5′-block is an Sp block wherein each of internucleotidic linkage is a modified internucleotidic linkage and each sugar moiety comprises a 2′-F modification. In some embodiments, a 5′-block is an Sp block wherein each of internucleotidic linkage is a phosphorothioate linkage and each sugar moiety comprises a 2′-F modification. In some embodiments, a 5′-block comprises 4 or more nucleoside units. In some embodiments, a 5′-block comprises 5 or more nucleoside units. In some embodiments, a 5′-block comprises 6 or more nucleoside units. In some embodiments, a 5′-block comprises 7 or more nucleoside units. In some embodiments, a 3′-block is an Sp block wherein each sugar moiety comprises a 2′-F modification. In some embodiments, a 3′-block is an Sp block wherein each of internucleotidic linkage is a modified internucleotidic linkage and each sugar moiety comprises a 2′-F modification. In some embodiments, a 3′-block is an Sp block wherein each of internucleotidic linkage is a phosphorothioate linkage and each sugar moiety comprises a 2′-F modification. In some embodiments, a 3′-block comprises 4 or more nucleoside units. In some embodiments, a 3′-block comprises 5 or more nucleoside units. In some embodiments, a 3′-block comprises 6 or more nucleoside units. In some embodiments, a 3′-block comprises 7 or more nucleoside units.

[0518] In some embodiments, compound of the invention comprises a type of nucleoside in a region or an oligonucleotide is followed by a specific type of internucleotidic linkage, e.g., natural phosphate linkage, modified internucleotidic linkage, Rp chiral internucleotidic linkage, Sp chiral internucleotidic linkage, etc. In some embodiments, A is followed by Sp. In some embodiments, A is followed by Rp. In some embodiments, A is followed by natural phosphate linkage (PO). In some embodiments, U is followed by Sp. In some embodiments, U is followed by Rp. In some embodiments, U is followed by natural phosphate linkage (PO). In some embodiments, C is followed by Sp. In some embodiments, C is followed by Rp. In some embodiments, C is followed by natural phosphate linkage (PO). In some embodiments, G is followed by Sp. In some embodiments, G is followed by Rp. In some embodiments, G is followed by natural phosphate linkage (PO). In some embodiments, C and U are followed by Sp. In some embodiments, C and U are followed by Rp. In some embodiments, C and U are followed by natural phosphate linkage (PO). In some embodiments, A and G are followed by Sp. In some embodiments, A and G are followed by Rp.

[0519] In some embodiments, the antisense strand comprises phosphorothioate internucleotide linkages between nucleotide positions 21 and 22, and between nucleotide positions 22 and 23, wherein the antisense strand contains at least one thermally destabilizing modification of the duplex located in the seed region of the antisense strand (i.e., at position 2-9 of the 5′-end of the antisense strand), and wherein the dsRNA optionally further has at least one (e.g., one, two, three, four, five, six, seven or all eight) of the following characteristics: (i) the antisense comprises 2, 3, 4, 5 or 6 2′-fluoro modifications; (ii) the antisense comprises 3, 4 or 5 phosphorothioate internucleotide linkages; (iii) the sense strand is conjugated with a ligand; (iv) the sense strand comprises 2, 3, 4 or 5 2′-fluoro modifications; (v) the sense strand comprises 1, 2, 3, 4 or 5 phosphorothioate internucleotide linkages; (vi) the dsRNA comprises at least four 2′-fluoro modifications; (vii) the dsRNA comprises a duplex region of 12-40 nucleotide pairs in length; and (viii) the dsRNA has a blunt end at 5′-end of the antisense strand, and wherein the destabilizing modification is selected from mUNA and GNA building blocks described in Examples 1-3 herein. In some embodiments, the destabilizing modification is selected from the group consisting of GNA-isoC, GNA-isoG, 5′-mUNA, 4′-mUNA, 3′-mUNA, and 2′-mUNA. In some further embodiments of this, the dsRNA molecule further comprises at least one thermally destabilizing modification selected from the group consisting of GNA, 2′-OMe, 3′-OMe, 5′-Me, Hy p-spacer, SNA, hGNA, hhGNA, mGNA, TNA and h′GNA (Mod A-Mod K).

[0520] In some embodiments, the antisense strand comprises phosphorothioate internucleotide linkages between nucleotide positions 1 and 2, between nucleotide positions 2 and 3, between nucleotide positions 21 and 22, and between nucleotide positions 22 and 23, wherein the antisense strand contains at least one thermally destabilizing modification of the duplex located in the seed region of the antisense strand (i.e., at position 2-9 of the 5′-end of the antisense strand), and wherein the dsRNA optionally further has at least one (e.g., one, two, three, four, five, six, seven or all eight) of the following characteristics: (i) the antisense comprises 2, 3, 4, 5 or 6 2′-fluoro modifications; (ii) the sense strand is conjugated with a ligand; (iii) the sense strand comprises 2, 3, 4 or 5 2′-fluoro modifications; (iv) the sense strand comprises 1, 2, 3, 4 or 5 phosphorothioate internucleotide linkages; (v) the dsRNA comprises at least four 2′-fluoro modifications; (vi) the dsRNA comprises a duplex region of 12-40 nucleotide pairs in length; (vii) the dsRNA comprises a duplex region of 12-40 nucleotide pairs in length; and (viii) the dsRNA has a blunt end at 5′-end of the antisense strand, and wherein the destabilizing modification is selected from mUNA and GNA building blocks described in Examples 1-3 herein. In some embodiments, the destabilizing modification is selected from the group consisting of GNA-isoC, GNA-isoG, 5′-mUNA, 4′-mUNA, 3′-mUNA, and 2′-mUNA. In some further embodiments of this, the dsRNA molecule further comprises at least one thermally destabilizing modification selected from the group consisting of GNA, 2′-OMe, 3′-OMe, 5′-Me, Hy p-spacer, SNA, hGNA, hhGNA, mGNA, TNA and h′GNA (Mod A-Mod K).

[0521] In some embodiments, the sense strand comprises phosphorothioate internucleotide linkages between nucleotide positions 1 and 2, and between nucleotide positions 2 and 3, wherein the antisense strand contains at least one thermally destabilizing modification of the duplex located in the seed region of the antisense strand (i.e., at position 2-9 of the 5′-end of the antisense strand), and wherein the dsRNA optionally further has at least one (e.g., one, two, three, four, five, six, seven or all eight) of the following characteristics: (i) the antisense comprises 2, 3, 4, 5 or 6 2′-fluoro modifications; (ii) the antisense comprises 1, 2, 3, 4 or 5 phosphorothioate internucleotide linkages; (iii) the sense strand is conjugated with a ligand; (iv) the sense strand comprises 2, 3, 4 or 5 2′-fluoro modifications; (v) the sense strand comprises 3, 4 or 5 phosphorothioate internucleotide linkages; (vi) the dsRNA comprises at least four 2′-fluoro modifications; (vii) the dsRNA comprises a duplex region of 12-40 nucleotide pairs in length; and (viii) the dsRNA has a blunt end at 5′-end of the antisense strand, wherein the destabilizing modification is selected from mUNA and GNA building blocks described in Examples 1-3 herein. In some embodiments, the destabilizing modification is selected from the group consisting of GNA-isoC, GNA-isoG, 5′-mUNA, 4′-mUNA, 3′-mUNA, and 2′-mUNA. In some further embodiments of this, the dsRNA molecule further comprises at least one thermally destabilizing modification selected from the group consisting of GNA, 2′-OMe, 3′-OMe, 5′-Me, Hy p-spacer, SNA, hGNA, hhGNA, mGNA, TNA and h′GNA (Mod A-Mod K).

[0522] In some embodiments, the sense strand comprises phosphorothioate internucleotide linkages between nucleotide positions 1 and 2, and between nucleotide positions 2 and 3, the antisense strand comprises phosphorothioate internucleotide linkages between nucleotide positions 1 and 2, between nucleotide positions 2 and 3, between nucleotide positions 21 and 22, and between nucleotide positions 22 and 23, wherein the antisense strand contains at least one thermally destabilizing modification of the duplex located in the seed region of the antisense strand (i.e., at position 2-9 of the 5′-end of the antisense strand), and wherein the dsRNA optionally further has at least one (e.g., one, two, three, four, five, six or all seven) of the following characteristics: (i) the antisense comprises 2, 3, 4, 5 or 6 2′-fluoro modifications; (ii) the sense strand is conjugated with a ligand; (iii) the sense strand comprises 2, 3, 4 or 5 2′-fluoro modifications; (iv) the sense strand comprises 3, 4 or 5 phosphorothioate internucleotide linkages; (v) the dsRNA comprises at least four 2′-fluoro modifications; (vi) the dsRNA comprises a duplex region of 12-40 nucleotide pairs in length; and (vii) the dsRNA has a blunt end at 5′-end of the antisense strand, wherein the destabilizing modification is selected from mUNA and GNA building blocks described in Examples 1-3 herein. In some embodiments, the destabilizing modification is selected from the group consisting of GNA-isoC, GNA-isoG, 5′-mUNA, 4′-mUNA, 3′-mUNA, and 2′-mUNA. In some further embodiments of this, the dsRNA molecule further comprises at least one thermally destabilizing modification selected from the group consisting of GNA, 2′-OMe, 3′-OMe, 5′-Me, Hy p-spacer, SNA, hGNA, hhGNA, mGNA, TNA and h′GNA (Mod A-Mod K).

[0523] In some embodiments, the dsRNA molecule of the invention comprises mismatch(es) with the target, within the duplex, or combinations thereof. The mismatch can occur in the overhang region or the duplex region. The base pair can be ranked on the basis of their propensity to promote dissociation or melting (e.g., on the free energy of association or dissociation of a particular pairing, the simplest approach is to examine the pairs on an individual pair basis, though next neighbor or similar analysis can also be used). In terms of promoting dissociation: A:U is preferred over G:C; G:U is preferred over G:C; and I:C is preferred over G:C (I=inosine). Mismatches, e.g., non-canonical or other than canonical pairings (as described elsewhere herein) are preferred over canonical (A:T, A:U, G:C) pairings; and pairings which include a universal base are preferred over canonical pairings.

[0524] In some embodiments, the dsRNA molecule of the invention comprises at least one of the first 1, 2, 3, 4, or 5 base pairs within the duplex regions from the 5′-end of the antisense strand can be chosen independently from the group of: A:U, G:U, I:C, and mismatched pairs, e.g., non-canonical or other than canonical pairings or pairings which include a universal base, to promote the dissociation of the antisense strand at the 5′-end of the duplex.

[0525] In some embodiments, the nucleotide at the 1 position within the duplex region from the 5′-end in the antisense strand is selected from the group consisting of A, dA, dU, U, and dT. Alternatively, at least one of the first 1, 2 or 3 base pair within the duplex region from the 5′-end of the antisense strand is an AU base pair. For example, the first base pair within the duplex region from the 5′-end of the antisense strand is an AU base pair.

[0526] The inventors found that introducing 4′-modified and/or 5′-modified nucleotide to the 3′-end of a phosphodiester (PO), phosphorothioate (PS), and/or phosphorodithioate (PS2) linkage of a dinucleotide at any position of single stranded or double stranded oligonucleotide can exert steric effect to the internucleotide linkage and, hence, protecting or stabilizing it against nucleases.

[0527] In some embodiments, 5′-modified nucleoside is introduced at the 3′-end of a dinucleotide at any position of single stranded or double stranded siRNA. For instance, a 5′-alkylated nucleoside may be introduced at the 3′-end of a dinucleotide at any position of single stranded or double stranded siRNA. The alkyl group at the 5′ position of the ribose sugar can be racemic or chirally pure R or S isomer. An exemplary 5′-alkylated nucleoside is 5′-methyl nucleoside. The 5′-methyl can be either racemic or chirally pure R or S isomer.

[0528] In some embodiments, 4′-modified nucleoside is introduced at the 3′-end of a dinucleotide at any position of single stranded or double stranded siRNA. For instance, a 4′-alkylated nucleoside may be introduced at the 3′-end of a dinucleotide at any position of single stranded or double stranded siRNA. The alkyl group at the 4′ position of the ribose sugar can be racemic or chirally pure R or S isomer. An exemplary 4′-alkylated nucleoside is 4′-methyl nucleoside. The 4′-methyl can be either racemic or chirally pure R or S isomer. Alternatively, a 4′-O-alkylated nucleoside may be introduced at the 3′-end of a dinucleotide at any position of single stranded or double stranded siRNA. The 4′-O-alkyl of the ribose sugar can be racemic or chirally pure R or S isomer. An exemplary 4′-O-alkylated nucleoside is 4′-O-methyl nucleoside. The 4′-O-methyl can be either racemic or chirally pure R or S isomer.

[0529] In some embodiments, 5′-alkylated nucleoside is introduced at any position on the sense strand or antisense strand of a dsRNA, and such modification maintains or improves potency of the dsRNA. The 5′-alkyl can be either racemic or chirally pure R or S isomer. An exemplary 5′-alkylated nucleoside is 5′-methyl nucleoside. The 5′-methyl can be either racemic or chirally pure R or S isomer.

[0530] In some embodiments, 4′-alkylated nucleoside is introduced at any position on the sense strand or antisense strand of a dsRNA, and such modification maintains or improves potency of the dsRNA. The 4′-alkyl can be either racemic or chirally pure R or S isomer. An exemplary 4′-alkylated nucleoside is 4′-methyl nucleoside. The 4′-methyl can be either racemic or chirally pure R or S isomer.

[0531] In some embodiments, 4′-O-alkylated nucleoside is introduced at any position on the sense strand or antisense strand of a dsRNA, and such modification maintains or improves potency of the dsRNA. The 5′-alkyl can be either racemic or chirally pure R or S isomer. An exemplary 4′-O-alkylated nucleoside is 4′-O-methyl nucleoside. The 4′-O-methyl can be either racemic or chirally pure R or S isomer.

[0532] In some embodiments, the dsRNA molecule of the invention can comprise 2′-5′ linkages (with 2′-H, 2′-OH and 2′-OMe and with P=O or P=S). For example, the 2′-5′ linkages modifications can be used to promote nuclease resistance or to inhibit binding of the sense to the antisense strand, or can be used at the 5′ end of the sense strand to avoid sense strand activation by RISC.

[0533] In another embodiment, the dsRNA molecule of the invention can comprise L sugars (e.g., L ribose, L-arabinose with 2′-H, 2′-OH and 2′-OMe). For example, these L sugars modifications can be used to promote nuclease resistance or to inhibit binding of the sense to the antisense strand, or can be used at the 5′ end of the sense strand to avoid sense strand activation by RISC.

[0534] Various publications describe multimeric siRNA which can all be used with the dsRNA of the invention. Such publications include WO2007/091269, U.S. Pat. No. 7,858,769, WO2010/141511, WO2007/117686, WO2009/014887 and WO2011/031520 which are hereby incorporated by their entirely.

[0535] The dsRNA molecule that contains conjugations of one or more carbohydrate moieties to a dsRNA molecule can optimize one or more properties of the dsRNA molecule. In many cases, the carbohydrate moiety will be attached to a modified subunit of the dsRNA molecule. E.g., the ribose sugar of one or more ribonucleotide subunits of a dsRNA molecule can be replaced with another moiety, e.g., a non-carbohydrate (preferably cyclic) carrier to which is attached a carbohydrate ligand. A ribonucleotide subunit in which the ribose sugar of the subunit has been so replaced is referred to herein as a ribose replacement modification subunit (RRMS). A cyclic carrier may be a carbocyclic ring system, i.e., all ring atoms are carbon atoms, or a heterocyclic ring system, i.e., one or more ring atoms may be a heteroatom, e.g., nitrogen, oxygen, sulfur. The cyclic carrier may be a monocyclic ring system, or may contain two or more rings, e.g. fused rings. The cyclic carrier may be a fully saturated ring system, or it may contain one or more double bonds.

[0536] The ligand may be attached to the polynucleotide via a carrier. The carriers include (i) at least one “backbone attachment point,” preferably two “backbone attachment points” and (ii) at least one “tethering attachment point.” A “backbone attachment point” as used herein refers to a functional group, e.g. a hydroxyl group, or generally, a bond available for, and that is suitable for incorporation of the carrier into the backbone, e.g., the phosphate, or modified phosphate, e.g., sulfur containing, backbone, of a ribonucleic acid. A “tethering attachment point” (TAP) in some embodiments refers to a constituent ring atom of the cyclic carrier, e.g., a carbon atom or a heteroatom (distinct from an atom which provides a backbone attachment point), that connects a selected moiety. The moiety can be, e.g., a carbohydrate, e.g. monosaccharide, disaccharide, trisaccharide, tetrasaccharide, oligosaccharide and polysaccharide. Optionally, the selected moiety is connected by an intervening tether to the cyclic carrier. Thus, the cyclic carrier will often include a functional group, e.g., an amino group, or generally, provide a bond, that is suitable for incorporation or tethering of another chemical entity, e.g., a ligand to the constituent ring.

[0537] In one embodiment the dsRNA molecule of the invention is conjugated to a ligand via a carrier, wherein the carrier can be cyclic group or acyclic group; preferably, the cyclic group is selected from pyrrolidinyl, pyrazolinyl, pyrazolidinyl, imidazolinyl, imidazolidinyl, piperidinyl, piperazinyl, [1,3]dioxolane, oxazolidinyl, isoxazolidinyl, morpholinyl, thiazolidinyl, isothiazolidinyl, quinoxalinyl, pyridazinonyl, tetrahydrofuryl and decalin; preferably, the acyclic group is selected from serinol backbone or diethanolamine backbone.

[0538] The double-stranded RNA (dsRNA) agent of the invention may optionally be conjugated to one or more ligands. The ligand can be attached to the sense strand, antisense strand or both strands, at the 3′-end, 5′-end or both ends. For instance, the ligand may be conjugated to the sense strand, in particular, the 3′-end of the sense strand.

[0539] In some embodiments dsRNA molecules of the invention are 5′ phosphorylated or include a phosphoryl analog at the 5′ prime terminus. 5′-phosphate modifications include those which are compatible with RISC mediated gene silencing. Suitable modifications include: 5′-monophosphate ((HO)₂(O)P—O-5′); 5′-diphosphate ((HO)₂(O)P—O—P(HO)(O)—O-5′); 5′-triphosphate ((HO)₂(O)P—O—(HO)(O)P—O—P(HO)(O)—O-5′); 5′-guanosine cap (7-methylated or non-methylated) (7m-G-O-5′-(HO)(O)P—O—(HO)(O)P—O—P(HO)(O)—O-5′); 5′-adenosine cap (Appp), and any modified or unmodified nucleotide cap structure (N—O-5′-(HO)(O)P—O—(HO)(O)P—O—P(HO)(O)—O-5′); 5′-monothiophosphate (phosphorothioate; (HO)₂(S)P—O-5′); 5′-monodithiophosphate (phosphorodithioate; (HO)(HS)(S)P—O-5′), 5′-phosphorothiolate ((HO)₂(O)P—S-5′); any additional combination of oxygen/sulfur replaced monophosphate, diphosphate and triphosphates (e.g. 5′-alpha-thiotriphosphate, 5′-gamma-thiotriphosphate, etc.), 5′-phosphoramidates ((HO)₂(O)P—NH-5′, (HO)(NH₂)(O)P—O-5′), 5′-alkylphosphonates (R=alkyl=methyl, ethyl, isopropyl, propyl, etc., e.g. RP(OH)(O)—O-5′-, 5′-alkenylphosphonates (i.e. vinyl, substituted vinyl), (OH)₂(O)P-5′-CH2-), 5′-alkyletherphosphonates (R=alkylether=methoxymethyl (MeOCH2-), ethoxymethyl, etc., e.g. RP(OH)(O)—O-5′-). In one example, the modification can in placed in the antisense strand of a dsRNA molecule.

### Ligands

[0540] A wide variety of entities can be coupled to the oligonucleotides of the present invention. Preferred moieties are ligands, which are coupled, preferably covalently, either directly or indirectly via an intervening tether.

[0541] In preferred embodiments, a ligand alters the distribution, targeting or lifetime of the molecule into which it is incorporated. In preferred embodiments a ligand provides an enhanced affinity for a selected target, e.g., molecule, cell or cell type, compartment, receptor e.g., a cellular or organ compartment, tissue, organ or region of the body, as, e.g., compared to a species absent such a ligand. Ligands providing enhanced affinity for a selected target are also termed targeting ligands.

[0542] Some ligands can have endosomolytic properties. The endosomolytic ligands promote the lysis of the endosome and/or transport of the composition of the invention, or its components, from the endosome to the cytoplasm of the cell. The endosomolytic ligand may be a polyanionic peptide or peptidomimetic which shows pH-dependent membrane activity and fusogenicity. In some embodiments, the endosomolytic ligand assumes its active conformation at endosomal pH. The “active” conformation is that conformation in which the endosomolytic ligand promotes lysis of the endosome and/or transport of the composition of the invention, or its components, from the endosome to the cytoplasm of the cell. Exemplary endosomolytic ligands include the GALA peptide (Subbarao et al., Biochemistry, 1987, 26: 2964-2972, which is incorporated by reference in its entirety), the EALA peptide (Vogel et al., J. Am. Chem. Soc., 1996, 118: 1581-1586, which is incorporated by reference in its entirety), and their derivatives (Turk et al., Biochem. Biophys. Acta, 2002, 1559: 56-68, which is incorporated by reference in its entirety). In some embodiments, the endosomolytic component may contain a chemical group (e.g., an amino acid) which will undergo a change in charge or protonation in response to a change in pH. The endosomolytic component may be linear or branched.

[0543] Ligands can improve transport, hybridization, and specificity properties and may also improve nuclease resistance of the resultant natural or modified oligoribonucleotide, or a polymeric molecule comprising any combination of monomers described herein and/or natural or modified ribonucleotides.

[0544] Ligands in general can include therapeutic modifiers, e.g., for enhancing uptake; diagnostic compounds or reporter groups e.g., for monitoring distribution; cross-linking agents; and nuclease-resistance conferring moieties. General examples include lipids, steroids, vitamins, sugars, proteins, peptides, polyamines, and peptide mimics.

[0545] Ligands can include a naturally occurring substance, such as a protein (e.g., human serum albumin (HSA), low-density lipoprotein (LDL), high-density lipoprotein (HDL), or globulin); a carbohydrate (e.g., a dextran, pullulan, chitin, chitosan, inulin, cyclodextrin or hyaluronic acid); or a lipid. The ligand may also be a recombinant or synthetic molecule, such as a synthetic polymer, e.g., a synthetic polyamino acid, an oligonucleotide (e.g. an aptamer). Examples of polyamino acids include polyamino acid is a polylysine (PLL), poly L-aspartic acid, poly L-glutamic acid, styrene-maleic acid anhydride copolymer, poly(L-lactide-co-glycolide) copolymer, divinyl ether-maleic anhydride copolymer, N-(2-hydroxypropyl)methacrylamide copolymer (HMPA), polyethylene glycol (PEG), polyvinyl alcohol (PVA), polyurethane, poly(2-ethylacryllic acid), N-isopropylacrylamide polymers, or polyphosphazine. Example of polyamines include: polyethylenimine, polylysine (PLL), spermine, spermidine, polyamine, pseudopeptide-polyamine, peptidomimetic polyamine, dendrimer polyamine, arginine, amidine, protamine, cationic lipid, cationic porphyrin, quaternary salt of a polyamine, or an alpha helical peptide.

[0546] Ligands can also include targeting groups, e.g., a cell or tissue targeting agent, e.g., a lectin, glycoprotein, lipid or protein, e.g., an antibody, that binds to a specified cell type such as a kidney cell. A targeting group can be a thyrotropin, melanotropin, lectin, glycoprotein, surfactant protein A, Mucin carbohydrate, multivalent lactose, multivalent galactose, N-acetyl-galactosamine, N-acetyl-glucosamine multivalent mannose, multivalent fucose, glycosylated polyamino acids, multivalent galactose, transferrin, bisphosphonate, polyglutamate, polyaspartate, a lipid, cholesterol, a steroid, bile acid, folate, vitamin B12, biotin, an RGD peptide, an RGD peptide mimetic or an aptamer.

[0547] Other examples of ligands include dyes, intercalating agents (e.g. acridines), cross-linkers (e.g. psoralen, mitomycin C), porphyrins (TPPC4, texaphyrin, Sapphyrin), polycyclic aromatic hydrocarbons (e.g., phenazine, dihydrophenazine), artificial endonucleases or a chelating agent (e.g. EDTA), lipophilic molecules, e.g., cholesterol, cholic acid, adamantane acetic acid, 1-pyrene butyric acid, dihydrotestosterone, 1,3-Bis-O(hexadecyl)glycerol, geranyloxyhexyl group, hexadecylglycerol, borneol, menthol, 1,3-propanediol, heptadecyl group, palmitic acid, myristic acid,O3-(oleoyl)lithocholic acid, O3-(oleoyl)cholenic acid, dimethoxytrityl, or phenoxazine) and peptide conjugates (e.g., antennapedia peptide, Tat peptide), alkylating agents, phosphate, amino, mercapto, PEG (e.g., PEG-40K), MPEG, [MPEG]₂, polyamino, alkyl, substituted alkyl, radiolabeled markers, enzymes, haptens (e.g. biotin), transport/absorption facilitators (e.g., aspirin, vitamin E, folic acid), synthetic ribonucleases (e.g., imidazole, bisimidazole, histamine, imidazole clusters, acridine-imidazole conjugates, Eu3+ complexes of tetraazamacrocycles), dinitrophenyl, HRP, or AP.

[0548] Ligands can be proteins, e.g., glycoproteins, or peptides, e.g., molecules having a specific affinity for a co-ligand, or antibodies e.g., an antibody, that binds to a specified cell type such as a cancer cell, endothelial cell, or bone cell. Ligands may also include hormones and hormone receptors. They can also include non-peptide species, such as lipids, lectins, carbohydrates, vitamins, cofactors, multivalent lactose, multivalent galactose, N-acetyl-galactosamine, N-acetyl-glucosamine multivalent mannose, multivalent fucose, or aptamers. The ligand can be, for example, a lipopolysaccharide, an activator of p38 MAP kinase, or an activator of NF-κB.

[0549] The ligand can be a substance, e.g., a drug, which can increase the uptake of the iRNA agent into the cell, for example, by disrupting the cell's cytoskeleton, e.g., by disrupting the cell's microtubules, microfilaments, and/or intermediate filaments. The drug can be, for example, taxon, vincristine, vinblastine, cytochalasin, nocodazole, japlakinolide, latrunculin A, phalloidin, swinholide A, indanocine, or myoservin.

[0550] The ligand can increase the uptake of the oligonucleotide into the cell by activating an inflammatory response, for example. Exemplary ligands that would have such an effect include tumor necrosis factor alpha (TNF-alpha), interleukin-1 beta, or gamma interferon.

[0551] In one aspect, the ligand is a lipid or lipid-based molecule. Such a lipid or lipid-based molecule preferably binds a serum protein, e.g., human serum albumin (HSA). An HSA binding ligand allows for distribution of the conjugate to a target tissue, e.g., a non-kidney target tissue of the body. For example, the target tissue can be the liver, including parenchymal cells of the liver. Other molecules that can bind HSA can also be used as ligands. For example, naproxen or aspirin can be used. A lipid or lipid-based ligand can (a) increase resistance to degradation of the conjugate, (b) increase targeting or transport into a target cell or cell membrane, and/or (c) can be used to adjust binding to a serum protein, e.g., HSA.

[0552] A lipid based ligand can be used to modulate, e.g., control the binding of the conjugate to a target tissue. For example, a lipid or lipid-based ligand that binds to HSA more strongly will be less likely to be targeted to the kidney and therefore less likely to be cleared from the body. A lipid or lipid-based ligand that binds to HSA less strongly can be used to target the conjugate to the kidney.

[0553] In a preferred embodiment, the lipid based ligand binds HSA. Preferably, it binds HSA with a sufficient affinity such that the conjugate will be preferably distributed to a non-kidney tissue. However, it is preferred that the affinity not be so strong that the HSA-ligand binding cannot be reversed.

[0554] In another preferred embodiment, the lipid based ligand binds HSA weakly or not at all, such that the conjugate will be preferably distributed to the kidney. Other moieties that target to kidney cells can also be used in place of or in addition to the lipid based ligand.

[0555] In another aspect, the ligand is a moiety, e.g., a vitamin, which is taken up by a target cell, e.g., a proliferating cell. These are particularly useful for treating disorders characterized by unwanted cell proliferation, e.g., of the malignant or non-malignant type, e.g., cancer cells. Exemplary vitamins include vitamin A, E, and K. Other exemplary vitamins include B vitamins, e.g., folic acid, B12, riboflavin, biotin, pyridoxal or other vitamins or nutrients taken up by cancer cells. Also included are HAS, low density lipoprotein (LDL) and high-density lipoprotein (HDL).

[0556] In another aspect, the ligand is a cell-permeation agent, preferably a helical cell-permeation agent. Preferably, the agent is amphipathic. An exemplary agent is a peptide such as tat or antennapedia. If the agent is a peptide, it can be modified, including a peptidylmimetic, invertomers, non-peptide or pseudo-peptide linkages, and use of D-amino acids. The helical agent is preferably an alpha-helical agent, which preferably has a lipophilic and a lipophobic phase.

[0557] The ligand can be a peptide or peptidomimetic. A peptidomimetic (also referred to herein as an oligopeptidomimetic) is a molecule capable of folding into a defined three-dimensional structure similar to a natural peptide. The peptide or peptidomimetic moiety can be about 5-50 amino acids long, e.g., about 5, 10, 15, 20, 25, 30, 35, 40, 45, or 50 amino acids long. A peptide or peptidomimetic can be, for example, a cell permeation peptide, cationic peptide, amphipathic peptide, or hydrophobic peptide (e.g., consisting primarily of Tyr, Trp or Phe). The peptide moiety can be a dendrimer peptide, constrained peptide or cross-linked peptide. In another alternative, the peptide moiety can include a hydrophobic membrane translocation sequence (MTS). An exemplary hydrophobic MTS-containing peptide is RFGF having the amino acid sequence AAVALLPAVLLALLAP (SEQ ID NO: 3). An RFGF analogue (e.g., amino acid sequence AALLPVLLAAP (SEQ ID NO: 4)) containing a hydrophobic MTS can also be a targeting moiety. The peptide moiety can be a “delivery” peptide, which can carry large polar molecules including peptides, oligonucleotides, and protein across cell membranes. For example, sequences from the HIV Tat protein (GRKKRRQRRRPPQ (SEQ ID NO: 5)) and the Drosophila Antennapedia protein (RQIKIWFQNRRMKWKK (SEQ ID NO: 6)) have been found to be capable of functioning as delivery peptides. A peptide or peptidomimetic can be encoded by a random sequence of DNA, such as a peptide identified from a phage-display library, or one-bead-one-compound (OBOC) combinatorial library (Lam et al., Nature, 354:82-94, 1991, which is incorporated by reference in its entirety). Preferably the peptide or peptidomimetic tethered to an iRNA agent via an incorporated monomer unit is a cell targeting peptide such as an arginine-glycine-aspartic acid (RGD)-peptide, or RGD mimic. A peptide moiety can range in length from about 5 amino acids to about 40 amino acids. The peptide moieties can have a structural modification, such as to increase stability or direct conformational properties. Any of the structural modifications described below can be utilized. An RGD peptide moiety can be used to target a tumor cell, such as an endothelial tumor cell or a breast cancer tumor cell (Zitzmann et al., Cancer Res., 62:5139-43, 2002, which is incorporated by reference in its entirety). An RGD peptide can facilitate targeting of an iRNA agent to tumors of a variety of other tissues, including the lung, kidney, spleen, or liver (Aoki et al., Cancer Gene Therapy 8:783-787, 2001, which is incorporated by reference in its entirety). Preferably, the RGD peptide will facilitate targeting of an iRNA agent to the kidney. The RGD peptide can be linear or cyclic, and can be modified, e.g., glycosylated or methylated to facilitate targeting to specific tissues. For example, a glycosylated RGD peptide can deliver an iRNA agent to a tumor cell expressing aᵥB3 (Haubner et al., Jour. Nucl. Med., 42:326-336, 2001, which is incorporated by reference in its entirety). Peptides that target markers enriched in proliferating cells can be used. E.g., RGD containing peptides and peptidomimetics can target cancer cells, in particular cells that exhibit an integrin. Thus, one could use RGD peptides, cyclic peptides containing RGD, RGD peptides that include D-amino acids, as well as synthetic RGD mimics. In addition to RGD, one can use other moieties that target the integrin ligand. Generally, such ligands can be used to control proliferating cells and angiogenesis. Preferred conjugates of this type ligands that targets PECAM-1, VEGF, or other cancer gene, e.g., a cancer gene described herein.

[0558] A “cell permeation peptide” is capable of permeating a cell, e.g., a microbial cell, such as a bacterial or fungal cell, or a mammalian cell, such as a human cell. A microbial cell-permeating peptide can be, for example, an α-helical linear peptide (e.g., LL-37 or Ceropin P1), a disulfide bond-containing peptide (e.g., α-defensin, β-defensin or bactenecin), or a peptide containing only one or two dominating amino acids (e.g., PR-39 or indolicidin). A cell permeation peptide can also include a nuclear localization signal (NLS). For example, a cell permeation peptide can be a bipartite amphipathic peptide, such as MPG, which is derived from the fusion peptide domain of HIV-1 gp41 and the NLS of SV40 large T antigen (Simeoni et al., Nucl. Acids Res. 31:2717-2724, 2003, which is incorporated by reference in its entirety).

[0559] In some embodiments, a targeting peptide can be an amphipathic α-helical peptide. Exemplary amphipathic α-helical peptides include, but are not limited to, cecropins, lycotoxins, paradaxins, buforin, CPF, bombinin-like peptide (BLP), cathelicidins, ceratotoxins, S. clava peptides, hagfish intestinal antimicrobial peptides (HFIAPs), magainines, brevinins-2, dermaseptins, melittins, pleurocidin, H₂A peptides, Xenopus peptides, esculentinis-1, and caerins. A number of factors will preferably be considered to maintain the integrity of helix stability. For example, a maximum number of helix stabilization residues will be utilized (e.g., leu, ala, or lys), and a minimum number helix destabilization residues will be utilized (e.g., proline, or cyclic monomeric units. The capping residue will be considered (for example Gly is an exemplary N-capping residue and/or C-terminal amidation can be used to provide an extra H-bond to stabilize the helix. Formation of salt bridges between residues with opposite charges, separated by i±3, or i±4 positions can provide stability. For example, cationic residues such as lysine, arginine, homo-arginine, ornithine or histidine can form salt bridges with the anionic residues glutamate or aspartate.

[0560] Peptide and peptidomimetic ligands include those having naturally occurring or modified peptides, e.g., D or L peptides; α, β, or γ peptides; N-methyl peptides; azapeptides; peptides having one or more amide, i.e., peptide, linkages replaced with one or more urea, thiourea, carbamate, or sulfonyl urea linkages; or cyclic peptides.

[0561] The targeting ligand can be any ligand that is capable of targeting a specific receptor. Examples are: folate, GalNAc, galactose, mannose, mannose-6P, clusters of sugars such as GalNAc cluster, mannose cluster, galactose cluster, or an aptamer. A cluster is a combination of two or more sugar units. The targeting ligands also include integrin receptor ligands, Chemokine receptor ligands, transferrin, biotin, serotonin receptor ligands, PSMA, endothelin, GCPII, somatostatin, LDL and HDL ligands. The ligands can also be based on nucleic acid, e.g., an aptamer. The aptamer can be unmodified or have any combination of modifications disclosed herein.

[0562] Endosomal release agents include imidazoles, poly or oligoimidazoles, PEIs, peptides, fusogenic peptides, polycarboxylates, polycations, masked oligo or poly cations or anions, acetals, polyacetals, ketals/polyketals, orthoesters, polymers with masked or unmasked cationic or anionic charges, dendrimers with masked or unmasked cationic or anionic charges.

[0563] PK modulator stands for pharmacokinetic modulator. PK modulator include lipophiles, bile acids, steroids, phospholipid analogues, peptides, protein binding agents, PEG, vitamins etc. Exemplary PK modulator include, but are not limited to, cholesterol, fatty acids, cholic acid, lithocholic acid, dialkylglycerides, diacylglyceride, phospholipids, sphingolipids, naproxen, ibuprofen, vitamin E, biotin etc. Oligonucleotides that comprise a number of phosphorothioate linkages are also known to bind to serum protein, thus short oligonucleotides, e.g. oligonucleotides of about 5 bases, 10 bases, 15 bases or 20 bases, comprising multiple of phosphorothioate linkages in the backbone are also amenable to the present invention as ligands (e.g. as PK modulating ligands).

[0564] In addition, aptamers that bind serum components (e.g. serum proteins) are also amenable to the present invention as PK modulating ligands.

[0565] Other ligand conjugates amenable to the invention are described in U.S. patent application Ser. No. 10/916,185, filed Aug. 10, 2004; U.S. Ser. No. 10/946,873, filed Sep. 21, 2004; U.S. Ser. No. 10/833,934, filed Aug. 3, 2007; U.S. Ser. No. 11/115,989 filed Apr. 27, 2005 and U.S. Ser. No. 11/944,227 filed Nov. 21, 2007, which are incorporated by reference in their entireties for all purposes.

[0566] When two or more ligands are present, the ligands can all have same properties, all have different properties or some ligands have the same properties while others have different properties. For example, a ligand can have targeting properties, have endosomolytic activity or have PK modulating properties. In a preferred embodiment, all the ligands have different properties.

[0567] Ligands can be coupled to the oligonucleotides at various places, for example, 3′-end, 5′-end, and/or at an internal position. In preferred embodiments, the ligand is attached to the oligonucleotides via an intervening tether, e.g. a carrier described herein. The ligand or tethered ligand may be present on a monomer when said monomer is incorporated into the growing strand. In some embodiments, the ligand may be incorporated via coupling to a “precursor” monomer after said “precursor” monomer has been incorporated into the growing strand. For example, a monomer having, e.g., an amino-terminated tether (i.e., having no associated ligand), e.g., TAP-(CH₂)ₙNH₂ may be incorporated into a growing oligonucleotide strand. In a subsequent operation, i.e., after incorporation of the precursor monomer into the strand, a ligand having an electrophilic group, e.g., a pentafluorophenyl ester or aldehyde group, can subsequently be attached to the precursor monomer by coupling the electrophilic group of the ligand with the terminal nucleophilic group of the precursor monomer's tether.

[0568] In another example, a monomer having a chemical group suitable for taking part in Click Chemistry reaction may be incorporated e.g., an azide or alkyne terminated tether/linker. In a subsequent operation, i.e., after incorporation of the precursor monomer into the strand, a ligand having complementary chemical group, e.g. an alkyne or azide can be attached to the precursor monomer by coupling the alkyne and the azide together.

[0569] For double-stranded oligonucleotides, ligands can be attached to one or both strands. In some embodiments, a double-stranded iRNA agent contains a ligand conjugated to the sense strand. In other embodiments, a double-stranded iRNA agent contains a ligand conjugated to the antisense strand.

[0570] In some embodiments, ligand can be conjugated to nucleobases, sugar moieties, or internucleosidic linkages of nucleic acid molecules. Conjugation to purine nucleobases or derivatives thereof can occur at any position including, endocyclic and exocyclic atoms. In some embodiments, the 2-, 6-, 7-, or 8-positions of a purine nucleobase are attached to a conjugate moiety. Conjugation to pyrimidine nucleobases or derivatives thereof can also occur at any position. In some embodiments, the 2-, 5-, and 6-positions of a pyrimidine nucleobase can be substituted with a conjugate moiety. Conjugation to sugar moieties of nucleosides can occur at any carbon atom. Example carbon atoms of a sugar moiety that can be attached to a conjugate moiety include the 2′, 3′, and 5′ carbon atoms. The 1′ position can also be attached to a conjugate moiety, such as in an abasic residue. Internucleosidic linkages can also bear conjugate moieties. For phosphorus-containing linkages (e.g., phosphodiester, phosphorothioate, phosphorodithioate, phosphoroamidate, and the like), the conjugate moiety can be attached directly to the phosphorus atom or to an O, N, or S atom bound to the phosphorus atom. For amine- or amide-containing internucleosidic linkages (e.g., PNA), the conjugate moiety can be attached to the nitrogen atom of the amine or amide or to an adjacent carbon atom.

[0571] In some embodiments, the ligand is conjugated to the sense strand. As described herein, the ligand can be conjugated at the 3′-end, 5′-end or at an internal position of the sense strand. In some embodiments, the ligand is conjugated to the 3′-end of the sense strand. Further, the ligand can be conjugated to a nucleobase, sugar moiety or internucleotide linkage of the sense strand.

[0572] Any suitable ligand in the field of RNA interference may be used, although the ligand is typically a carbohydrate e.g. monosaccharide (such as GalNAc), disaccharide, trisaccharide, tetrasaccharide, polysaccharide.

[0573] Linkers that conjugate the ligand to the nucleic acid include those discussed above. For example, the ligand can be one or more GalNAc (N-acetylgalactosamine) derivatives attached through a monovalent, bivalent or trivalent branched linker.

[0574] In some embodiments, the dsRNA of the invention is conjugated to a bivalent and trivalent branched linkers include the structures shown in any of formula (IV)-(VII):

[chemical structure]

wherein:
[0575] q^{2A}, q^{2B}, q^{3A}, q^{3B}, q^{4A}, q^{4B}, q^{5A}, q^{5B} and q^{5C} represent independently for each occurrence 0-20 and wherein the repeating unit can be the same or different;
[0576] P^{2A}, P^{2B}, P^{3A}, P^{3B}, P^{4A}, P^{4B}, P^{5A}, P^{5B}, P^{5C}T^{2A}, T^{2B}, T^{3A}, T^{3B}, T^{4A}, T^{4B} T^{5A}, T^{5B}, T^{5C} are each independently for each occurrence absent, CO, NH, O, S, OC(O), NHC(O), CH₂, CH₂NH or CH₂O;
[0577] Q^{2A}, Q^{2B}, Q^{3A}, Q^{3B}, Q^{4A}, Q^{4B}, Q^{5A}, Q^{5B}, Q^{5C} are independently for each occurrence absent, alkylene, substituted alkylene wherein one or more methylenes can be interrupted or terminated by one or more of O, S, S(O), SO₂, N(R^{N}), C(R′)═C(R″), C≡C or C(O);
[0578] R^{2A}, R^{2B}, R^{3A}, R^{3B}, R^{4A}, R^{4B}, R^{5A}, R^{5B}, R^{5C} are each independently for each occurrence absent, NH, O, S, CH₂, C(O)O, C(O)NH, NHCH(R^{a})C(O), —C(O)—CH(R^{a})—NH—, CO, CH═N—O,

[chemical structure]

heterocyclyl;
[0579] L^{2A}, L^{2B}, L^{3A}, L^{3B}, L^{4A}, L^{4B} L^{5A}, L^{5B} and L^{5C} represent the ligand; i.e. each independently for each occurrence a monosaccharide (such as GalNAc), disaccharide, trisaccharide, tetrasaccharide, oligosaccharide, or polysaccharide; and
[0580] R^{a} is H or amino acid side chain.

[0581] Trivalent conjugating GalNAc derivatives are particularly useful for use with RNAi agents for inhibiting the expression of a target gene, such as those of formula (VII):

[chemical structure]

[0582] wherein L^{5A}, L^{5B} and L^{5C} represent a monosaccharide, such as GalNAc derivative.

[0583] Examples of suitable bivalent and trivalent branched linker groups conjugating GalNAc derivatives include, but are not limited to, the following compounds:

[chemical structure]

[chemical structure]

### Definitions

[0584] As used herein, the terms “dsRNA”, “siRNA”, and “iRNA agent” are used interchangeably to agents that can mediate silencing of a target RNA, e.g., mRNA, e.g., a transcript of a gene that encodes a protein. For convenience, such mRNA is also referred to herein as mRNA to be silenced. Such a gene is also referred to as a target gene. In general, the RNA to be silenced is an endogenous gene or a pathogen gene. In addition, RNAs other than mRNA, e.g., tRNAs, and viral RNAs, can also be targeted.

[0585] As used herein, the phrase “mediates RNAi” refers to the ability to silence, in a sequence specific manner, a target RNA. While not wishing to be bound by theory, it is believed that silencing uses the RNAi machinery or process and a guide RNA, e.g., an siRNA agent of 21 to 23 nucleotides.

[0586] As used herein, “specifically hybridizable” and “complementary” are terms which are used to indicate a sufficient degree of complementarity such that stable and specific binding occurs between a compound of the invention and a target RNA molecule. Specific binding requires a sufficient degree of complementarity to avoid non-specific binding of the oligomeric compound to non-target sequences under conditions in which specific binding is desired, i.e., under physiological conditions in the case of assays or therapeutic treatment, or in the case of in vitro assays, under conditions in which the assays are performed. The non-target sequences typically differ by at least 5 nucleotides.

[0587] In some embodiments, a dsRNA molecule of the invention is “sufficiently complementary” to a target RNA, e.g., a target mRNA, such that the dsRNA molecule silences production of protein encoded by the target mRNA. In another embodiment, the dsRNA molecule of the invention is “exactly complementary” to a target RNA, e.g., the target RNA and the dsRNA duplex agent anneal, for example to form a hybrid made exclusively of Watson-Crick base pairs in the region of exact complementarity. A “sufficiently complementary” target RNA can include an internal region (e.g., of at least 10 nucleotides) that is exactly complementary to a target RNA. Moreover, in some embodiments, the dsRNA molecule of the invention specifically discriminates a single-nucleotide difference. In this case, the dsRNA molecule only mediates RNAi if exact complementary is found in the region (e.g., within 7 nucleotides of) the single-nucleotide difference.

[0588] As used herein, the term “oligonucleotide” refers to a nucleic acid molecule (RNA or DNA) for example of length less than 100, 200, 300, or 400 nucleotides.

[0589] The term ‘BNA’ refers to bridged nucleic acid, and is often referred as constrained or inaccessible RNA. BNA can contain a 5-, 6-membered, or even a 7-membered bridged structure with a “fixed” C₃′-endo sugar puckering. The bridge is typically incorporated at the 2′-, 4′-position of the ribose to afford a 2′, 4′-BNA nucleotide (e.g., LNA, or ENA). Examples of BNA nucleotides include the following nucleosides:

[chemical structure]

[0590] The term ‘LNA’ refers to locked nucleic acid, and is often referred as constrained or inaccessible RNA. LNA is a modified RNA nucleotide. The ribose moiety of an LNA nucleotide is modified with an extra bridge (e.g., a methylene bridge or an ethylene bridge) connecting the 2′ hydroxyl to the 4′ carbon of the same ribose sugar. For instance, the bridge can “lock” the ribose in the 3′-endo North) conformation:

[chemical structure]

[0591] The term ‘ENA’ refers to ethylene-bridged nucleic acid, and is often referred as constrained or inaccessible RNA.

[0592] The “cleavage site” herein means the backbone linkage in the target gene or the sense strand that is cleaved by the RISC mechanism by utilizing the iRNA agent. And the target cleavage site region comprises at least one or at least two nucleotides on both side of the cleavage site. For the sense strand, the cleavage site is the backbone linkage in the sense strand that would get cleaved if the sense strand itself was the target to be cleaved by the RNAi mechanism. The cleavage site can be determined using methods known in the art, for example the 5′-RACE assay as detailed in Soutschek et al., Nature (2004) 432, 173-178, which is incorporated by reference in its entirety. As is well understood in the art, the cleavage site region for a conical double stranded RNAi agent comprising two 21-nucleotides long strands (wherein the strands form a double stranded region of 19 consecutive base pairs having 2-nucleotide single stranded overhangs at the 3′-ends), the cleavage site region corresponds to positions 9-12 from the 5′-end of the sense strand.

### Cleavable Linking Groups

[0593] A cleavable linking group is one which is sufficiently stable outside the cell, but which upon entry into a target cell is cleaved to release the two parts the linker is holding together. In a preferred embodiment of the dsRNA molecule according to the present invention, the cleavable linking group is cleaved at least 10 times or more, preferably at least 100 times faster in the target cell or under a first reference condition (which can, e.g., be selected to mimic or represent intracellular conditions) than in the blood of a subject, or under a second reference condition (which can, e.g., be selected to mimic or represent conditions found in the blood or serum).

[0594] Cleavable linking groups are susceptible to cleavage agents, e.g., pH, redox potential or the presence of degradative molecules. Generally, cleavage agents are more prevalent or found at higher levels or activities inside cells than in serum or blood. Examples of such degradative agents include: redox agents which are selected for particular substrates or which have no substrate specificity, including, e.g., oxidative or reductive enzymes or reductive agents such as mercaptans, present in cells, that can degrade a redox cleavable linking group by reduction; esterases; endosomes or agents that can create an acidic environment, e.g., those that result in a pH of five or lower; enzymes that can hydrolyze or degrade an acid cleavable linking group by acting as a general acid, peptidases (which can be substrate specific), and phosphatases.

[0595] A cleavable linkage group, such as a disulfide bond can be susceptible to pH. The pH of human serum is 7.4, while the average intracellular pH is slightly lower, ranging from about 7.1-7.3. Endosomes have a more acidic pH, in the range of 5.5-6.0, and lysosomes have an even more acidic pH at around 5.0. Some linkers will have a cleavable linking group that is cleaved at a preferred pH, thereby releasing the cationic lipid from the ligand inside the cell, or into the desired compartment of the cell.

[0596] A linker can include a cleavable linking group that is cleavable by a particular enzyme. The type of cleavable linking group incorporated into a linker can depend on the cell to be targeted. For example, liver targeting ligands can be linked to the cationic lipids through a linker that includes an ester group. Liver cells are rich in esterases, and therefore the linker will be cleaved more efficiently in liver cells than in cell types that are not esterase-rich. Other cell-types rich in esterases include cells of the lung, renal cortex, and testis.

[0597] Linkers that contain peptide bonds can be used when targeting cell types rich in peptidases, such as liver cells and synoviocytes.

[0598] In general, the suitability of a candidate cleavable linking group can be evaluated by testing the ability of a degradative agent (or condition) to cleave the candidate linking group. It will also be desirable to also test the candidate cleavable linking group for the ability to resist cleavage in the blood or when in contact with other non-target tissue. Thus one can determine the relative susceptibility to cleavage between a first and a second condition, where the first is selected to be indicative of cleavage in a target cell and the second is selected to be indicative of cleavage in other tissues or biological fluids, e.g., blood or serum. The evaluations can be carried out in cell free systems, in cells, in cell culture, in organ or tissue culture, or in whole animals. It may be useful to make initial evaluations in cell-free or culture conditions and to confirm by further evaluations in whole animals. In preferred embodiments, useful candidate compounds are cleaved at least 2, 4, 10 or 100 times faster in the cell (or under in vitro conditions selected to mimic intracellular conditions) as compared to blood or serum (or under in vitro conditions selected to mimic extracellular conditions).

### Redox Cleavable Linking Groups

[0599] One class of cleavable linking groups is redox cleavable linking groups, which may be used in the dsRNA molecule according to the present invention that are cleaved upon reduction or oxidation. An example of reductively cleavable linking group is a disulfide linking group (—S—S—). To determine if a candidate cleavable linking group is a suitable “reductively cleavable linking group,” or for example is suitable for use with a particular iRNA moiety and particular targeting agent one can look to methods described herein. For example, a candidate can be evaluated by incubation with dithiothreitol (DTT), or other reducing agent using reagents know in the art, which mimic the rate of cleavage which would be observed in a cell, e.g., a target cell. The candidates can also be evaluated under conditions which are selected to mimic blood or serum conditions. In a preferred embodiment, candidate compounds are cleaved by at most 10% in the blood. In preferred embodiments, useful candidate compounds are degraded at least 2, 4, 10 or 100 times faster in the cell (or under in vitro conditions selected to mimic intracellular conditions) as compared to blood (or under in vitro conditions selected to mimic extracellular conditions). The rate of cleavage of candidate compounds can be determined using standard enzyme kinetics assays under conditions chosen to mimic intracellular media and compared to conditions chosen to mimic extracellular media.

### Phosphate-Based Cleavable Linking Groups

[0600] Phosphate-based cleavable linking groups, which may be used in the dsRNA molecule according to the present invention, are cleaved by agents that degrade or hydrolyze the phosphate group. An example of an agent that cleaves phosphate groups in cells are enzymes such as phosphatases in cells. Examples of phosphate-based linking groups are —O—P(O)(ORk)-O—, —O—P(S)(ORk)-O—, —O—P(S)(SRk)-O—, —S—P(O)(ORk)-O—, —O—P(O)(ORk)-S—, —S—P(O)(ORk)-S—, —O—P(S)(ORk)-S—, —S—P(S)(ORk)-O—, —O—P(O)(Rk)-O—, —O—P(S)(Rk)-O—, —S—P(O)(Rk)-O—, —S—P(S)(Rk)-O—, —S—P(O)(Rk)-S—, —O—P(S)(Rk)-S—. Preferred embodiments are —O—P(O)(OH)—O—, —O—P(S)(OH)—O—, —O—P(S)(SH)—O—, —S—P(O)(OH)—O—, —O—P(O)(OH)—S—, —S—P(O)(OH)—S—, —O—P(S)(OH)—S—, —S—P(S)(OH)—O—, —O—P(O)(H)—O—, —O—P(S)(H)—O—, —S—P(O)(H)—O—, —S—P(S)(H)—O—, —S—P(O)(H)—S—, —O—P(S)(H)—S—. A preferred embodiment is —O—P(O)(OH)—O—. These candidates can be evaluated using methods analogous to those described above.

### Acid Cleavable Linking Groups

[0601] Acid cleavable linking groups, which may be used in the dsRNA molecule according to the present invention, are linking groups that are cleaved under acidic conditions. In preferred embodiments acid cleavable linking groups are cleaved in an acidic environment with a pH of about 6.5 or lower (e.g., about 6.0, 5.5, 5.0, or lower), or by agents such as enzymes that can act as a general acid. In a cell, specific low pH organelles, such as endosomes and lysosomes can provide a cleaving environment for acid cleavable linking groups. Examples of acid cleavable linking groups include but are not limited to hydrazones, esters, and esters of amino acids. Acid cleavable groups can have the general formula —C═NN—, C(O)O, or —OC(O). A preferred embodiment is when the carbon attached to the oxygen of the ester (the alkoxy group) is an aryl group, substituted alkyl group, or tertiary alkyl group such as dimethyl pentyl or t-butyl. These candidates can be evaluated using methods analogous to those described above.

### Ester-Based Linking Groups

[0602] Ester-based cleavable linking groups, which may be used in the dsRNA molecule according to the present invention, are cleaved by enzymes such as esterases and amidases in cells. Examples of ester-based cleavable linking groups include but are not limited to esters of alkylene, alkenylene and alkynylene groups. Ester cleavable linking groups have the general formula —C(O)O—, or —OC(O)—. These candidates can be evaluated using methods analogous to those described above.

### Peptide-Based Cleaving Groups

[0603] Peptide-based cleavable linking groups, which may be used in the dsRNA molecule according to the present invention, are cleaved by enzymes such as peptidases and proteases in cells. Peptide-based cleavable linking groups are peptide bonds formed between amino acids to yield oligopeptides (e.g., dipeptides, tripeptides etc.) and polypeptides. Peptide-based cleavable groups do not include the amide group (—C(O)NH—). The amide group can be formed between any alkylene, alkenylene or alkynylene. A peptide bond is a special type of amide bond formed between amino acids to yield peptides and proteins. The peptide based cleavage group is generally limited to the peptide bond (i.e., the amide bond) formed between amino acids yielding peptides and proteins and does not include the entire amide functional group. Peptide-based cleavable linking groups have the general formula—NHCHR^{A}C(O)NHCHR^{B}C(O)—, where R^{A} and R^{B} are the R groups of the two adjacent amino acids. These candidates can be evaluated using methods analogous to those described above. As used herein, “carbohydrate” refers to a compound which is either a carbohydrate per se made up of one or more monosaccharide units having at least 6 carbon atoms (which may be linear, branched or cyclic) with an oxygen, nitrogen or sulfur atom bonded to each carbon atom; or a compound having as a part thereof a carbohydrate moiety made up of one or more monosaccharide units each having at least six carbon atoms (which may be linear, branched or cyclic), with an oxygen, nitrogen or sulfur atom bonded to each carbon atom. Representative carbohydrates include the sugars (mono-, di-, tri- and oligosaccharides containing from about 4-9 monosaccharide units), and polysaccharides such as starches, glycogen, cellulose and polysaccharide gums. Specific monosaccharides include C₅ and above (preferably C₅-C₈) sugars; di- and trisaccharides include sugars having two or three monosaccharide units (preferably C₅-C₈).

[0604] The present invention further relates to a use of a dsRNA molecule as defined herein for inhibiting expression of a target gene. In some embodiments, the present invention further relates to a use of a dsRNA molecule for inhibiting expression of a target gene in vitro.

[0605] The present invention further relates to a dsRNA molecule as defined herein for use in inhibiting expression of a target gene in a subject. The subject may be any animal, such as a mammal, e.g., a mouse, a rat, a sheep, a cattle, a dog, a cat, or a human

[0606] In some embodiments, the dsRNA molecule of the invention is administered in buffer.

[0607] In some embodiments, siRNA compounds described herein can be formulated for administration to a subject. A formulated siRNA composition can assume a variety of states. In some examples, the composition is at least partially crystalline, uniformly crystalline, and/or anhydrous (e.g., less than 80, 50, 30, 20, or 10% water). In another example, the siRNA is in an aqueous phase, e.g., in a solution that includes water.

[0608] The aqueous phase or the crystalline compositions can, e.g., be incorporated into a delivery vehicle, e.g., a liposome (particularly for the aqueous phase) or a particle (e.g., a microparticle as can be appropriate for a crystalline composition). Generally, the siRNA composition is formulated in a manner that is compatible with the intended method of administration, as described herein. For example, in particular embodiments the composition is prepared by at least one of the following methods: spray drying, lyophilization, vacuum drying, evaporation, fluid bed drying, or a combination of these techniques; or sonication with a lipid, freeze-drying, condensation and other self-assembly.

[0609] A siRNA preparation can be formulated in combination with another agent, e.g., another therapeutic agent or an agent that stabilizes a siRNA, e.g., a protein that complexes with siRNA to form an iRNP. Still other agents include chelating agents, e.g., EDTA (e.g., to remove divalent cations such as Mg²⁺), salts, RNAse inhibitors (e.g., a broad specificity RNAse inhibitor such as RNAsin) and so forth.

[0610] In some embodiments, the siRNA preparation includes another siRNA compound, e.g., a second siRNA that can mediate RNAi with respect to a second gene, or with respect to the same gene. Still other preparation can include at least 3, 5, ten, twenty, fifty, or a hundred or more different siRNA species. Such siRNAs can mediate RNAi with respect to a similar number of different genes.

[0611] In some embodiments, the siRNA preparation includes at least a second therapeutic agent (e.g., an agent other than a RNA or a DNA). For example, a siRNA composition for the treatment of a viral disease, e.g., HIV, might include a known antiviral agent (e.g., a protease inhibitor or reverse transcriptase inhibitor). In another example, a siRNA composition for the treatment of a cancer might further comprise a chemotherapeutic agent.

[0612] Exemplary formulations which can be used for administering the dsRNA molecule according to the present invention are discussed below.

[0613] Liposomes. For ease of exposition the formulations, compositions and methods in this section are discussed largely with regard to unmodified siRNA compounds. It may be understood, however, that these formulations, compositions and methods can be practiced with other siRNA compounds, e.g., modified siRNAs, and such practice is within the invention. An siRNA compound, e.g., a double-stranded siRNA compound, or ssiRNA compound, (e.g., a precursor, e.g., a larger siRNA compound which can be processed into a ssiRNA compound, or a DNA which encodes an siRNA compound, e.g., a double-stranded siRNA compound, or ssiRNA compound, or precursor thereof) preparation can be formulated for delivery in a membranous molecular assembly, e.g., a liposome or a micelle. As used herein, the term “liposome” refers to a vesicle composed of amphiphilic lipids arranged in at least one bilayer, e.g., one bilayer or a plurality of bilayers. Liposomes include unilamellar and multilamellar vesicles that have a membrane formed from a lipophilic material and an aqueous interior. The aqueous portion contains the siRNA composition. The lipophilic material isolates the aqueous interior from an aqueous exterior, which typically does not include the siRNA composition, although in some examples, it may. Liposomes are useful for the transfer and delivery of active ingredients to the site of action. Because the liposomal membrane is structurally similar to biological membranes, when liposomes are applied to a tissue, the liposomal bilayer fuses with bilayer of the cellular membranes. As the merging of the liposome and cell progresses, the internal aqueous contents that include the siRNA are delivered into the cell where the siRNA can specifically bind to a target RNA and can mediate RNAi. In some cases the liposomes are also specifically targeted, e.g., to direct the siRNA to particular cell types.

[0614] A liposome containing a siRNA can be prepared by a variety of methods. In one example, the lipid component of a liposome is dissolved in a detergent so that micelles are formed with the lipid component. For example, the lipid component can be an amphipathic cationic lipid or lipid conjugate. The detergent can have a high critical micelle concentration and may be nonionic. Exemplary detergents include cholate, CHAPS, octylglucoside, deoxycholate, and lauroyl sarcosine. The siRNA preparation is then added to the micelles that include the lipid component. The cationic groups on the lipid interact with the siRNA and condense around the siRNA to form a liposome. After condensation, the detergent is removed, e.g., by dialysis, to yield a liposomal preparation of siRNA.

[0615] If necessary a carrier compound that assists in condensation can be added during the condensation reaction, e.g., by controlled addition. For example, the carrier compound can be a polymer other than a nucleic acid (e.g., spermine or spermidine). pH can also be adjusted to favor condensation.

[0616] Further description of methods for producing stable polynucleotide delivery vehicles, which incorporate a polynucleotide/cationic lipid complex as structural components of the delivery vehicle, are described in, e.g., WO 96/37194. Liposome formation can also include one or more aspects of exemplary methods described in Felgner, P. L. et al., Proc. Natl. Acad. Sci., USA 8:7413-7417, 1987; U.S. Pat. Nos. 4,897,355; 5,171,678; Bangham, et al. M Mol. Biol. 23:238, 1965; Olson, et al. Biochim. Biophys. Acta 557:9, 1979; Szoka, et al. Proc. Natl. Acad. Sci. 75: 4194, 1978; Mayhew, et al. Biochim. Biophys. Acta 775:169, 1984; Kim, et al. Biochim. Biophys. Acta 728:339, 1983; and Fukunaga, et al. Endocrinol. 115:757, 1984, which are incorporated by reference in their entirety. Commonly used techniques for preparing lipid aggregates of appropriate size for use as delivery vehicles include sonication and freeze-thaw plus extrusion (see, e.g., Mayer, et al. Biochim. Biophys. Acta 858:161, 1986, which is incorporated by reference in its entirety). Microfluidization can be used when consistently small (50 to 200 nm) and relatively uniform aggregates are desired (Mayhew, et al. Biochim. Biophys. Acta 775:169, 1984, which is incorporated by reference in its entirety). These methods are readily adapted to packaging siRNA preparations into liposomes.

[0617] Liposomes that are pH-sensitive or negatively-charged entrap nucleic acid molecules rather than complex with them. Since both the nucleic acid molecules and the lipid are similarly charged, repulsion rather than complex formation occurs. Nevertheless, some nucleic acid molecules are entrapped within the aqueous interior of these liposomes. pH-sensitive liposomes have been used to deliver DNA encoding the thymidine kinase gene to cell monolayers in culture. Expression of the exogenous gene was detected in the target cells (Zhou et al., Journal of Controlled Release, 19, (1992) 269-274, which is incorporated by reference in its entirety).

[0618] One major type of liposomal composition includes phospholipids other than naturally-derived phosphatidylcholine. Neutral liposome compositions, for example, can be formed from dimyristoyl phosphatidylcholine (DMPC) or dipalmitoyl phosphatidylcholine (DPPC). Anionic liposome compositions generally are formed from dimyristoyl phosphatidylglycerol, while anionic fusogenic liposomes are formed primarily from dioleoyl phosphatidylethanolamine (DOPE). Another type of liposomal composition is formed from phosphatidylcholine (PC) such as, for example, soybean PC, and egg PC. Another type is formed from mixtures of phospholipid and/or phosphatidylcholine and/or cholesterol.

[0619] Examples of other methods to introduce liposomes into cells in vitro and include U.S. Pat. Nos. 5,283,185; 5,171,678; WO 94/00569; WO 93/24640; WO 91/16024; Felgner, J. Biol. Chem. 269:2550, 1994; Nabel, Proc. Natl. Acad. Sci. 90:11307, 1993; Nabel, Human Gene Ther. 3:649, 1992; Gershon, Biochem. 32:7143, 1993; and Strauss EMBO J. 11:417, 1992.

[0620] In some embodiments, cationic liposomes are used. Cationic liposomes possess the advantage of being able to fuse to the cell membrane. Non-cationic liposomes, although not able to fuse as efficiently with the plasma membrane, are taken up by macrophages in vivo and can be used to deliver siRNAs to macrophages.

[0621] Further advantages of liposomes include: liposomes obtained from natural phospholipids are biocompatible and biodegradable; liposomes can incorporate a wide range of water and lipid soluble drugs; liposomes can protect encapsulated siRNAs in their internal compartments from metabolism and degradation (Rosoff, in “Pharmaceutical Dosage Forms,” Lieberman, Rieger and Banker (Eds.), 1988, volume 1, p. 245). Important considerations in the preparation of liposome formulations are the lipid surface charge, vesicle size and the aqueous volume of the liposomes.

[0622] A positively charged synthetic cationic lipid, N-[1-(2,3-dioleyloxy)propyl]-N,N,N-trimethylammonium chloride (DOTMA) can be used to form small liposomes that interact spontaneously with nucleic acid to form lipid-nucleic acid complexes which are capable of fusing with the negatively charged lipids of the cell membranes of tissue culture cells, resulting in delivery of siRNA (see, e.g., Felgner, P. L. et al., Proc. Natl. Acad. Sci., USA 8:7413-7417, 1987 and U.S. Pat. No. 4,897,355 for a description of DOTMA and its use with DNA, which are incorporated by reference in their entirety).

[0623] A DOTMA analogue, 1,2-bis(oleoyloxy)-3-(trimethylammonia)propane (DOTAP) can be used in combination with a phospholipid to form DNA-complexing vesicles. Lipofectin™ Bethesda Research Laboratories, Gaithersburg, Md.) is an effective agent for the delivery of highly anionic nucleic acids into living tissue culture cells that comprise positively charged DOTMA liposomes which interact spontaneously with negatively charged polynucleotides to form complexes. When enough positively charged liposomes are used, the net charge on the resulting complexes is also positive. Positively charged complexes prepared in this way spontaneously attach to negatively charged cell surfaces, fuse with the plasma membrane, and efficiently deliver functional nucleic acids into, for example, tissue culture cells. Another commercially available cationic lipid, 1,2-bis(oleoyloxy)-3,3-(trimethylammonia)propane (“DOTAP”) (Boehringer Mannheim, Indianapolis, Indiana) differs from DOTMA in that the oleoyl moieties are linked by ester, rather than ether linkages.

[0624] Other reported cationic lipid compounds include those that have been conjugated to a variety of moieties including, for example, carboxyspermine which has been conjugated to one of two types of lipids and includes compounds such as 5-carboxyspermylglycine dioctaoleoylamide (“DOGS”) (Transfectam™, Promega, Madison, Wisconsin) and dipalmitoylphosphatidylethanolamine 5-carboxyspermyl-amide (“DPPES”) (see, e.g., U.S. Pat. No. 5,171,678).

[0625] Another cationic lipid conjugate includes derivatization of the lipid with cholesterol (“DC-Chol”) which has been formulated into liposomes in combination with DOPE (See, Gao, X. and Huang, L., Biochim. Biophys. Res. Commun. 179:280, 1991). Lipopolylysine, made by conjugating polylysine to DOPE, has been reported to be effective for transfection in the presence of serum (Zhou, X. et al., Biochim. Biophys. Acta 1065:8, 1991, which is incorporated by reference in its entirety). For certain cell lines, these liposomes containing conjugated cationic lipids, are said to exhibit lower toxicity and provide more efficient transfection than the DOTMA-containing compositions. Other commercially available cationic lipid products include DMRIE and DMRIE-HP (Vical, La Jolla, California) and Lipofectamine (DOSPA) (Life Technology, Inc., Gaithersburg, Maryland). Other cationic lipids suitable for the delivery of oligonucleotides are described in WO 98/39359 and WO 96/37194.

[0626] Liposomal formulations are particularly suited for topical administration. Liposomes present several advantages over other formulations. Such advantages include reduced side effects related to high systemic absorption of the administered drug, increased accumulation of the administered drug at the desired target, and the ability to administer siRNA, into the skin. In some implementations, liposomes are used for delivering siRNA to epidermal cells and also to enhance the penetration of siRNA into dermal tissues, e.g., into skin. For example, the liposomes can be applied topically. Topical delivery of drugs formulated as liposomes to the skin has been documented (see, e.g., Weiner et al., Journal of Drug Targeting, 1992, vol. 2, 405-410 and du Plessis et al., Antiviral Research, 18, 1992, 259-265; Mannino, R. J. and Fould-Fogerite, S., Biotechniques 6:682-690, 1988; Itani, T. et al. Gene 56:267-276. 1987; Nicolau, C. et al. Meth. Enz. 149:157-176, 1987; Straubinger, R. M. and Papahadjopoulos, D. Meth. Enz. 101:512-527, 1983; Wang, C. Y. and Huang, L., Proc. Natl. Acad. Sci. USA 84:7851-7855, 1987, which are incorporated by reference in their entirety).

[0627] Non-ionic liposomal systems have also been examined to determine their utility in the delivery of drugs to the skin, in particular systems comprising non-ionic surfactant and cholesterol. Non-ionic liposomal formulations comprising Novasome I (glyceryl dilaurate/cholesterol/polyoxyethylene-10-stearyl ether) and Novasome II (glyceryl distearate/cholesterol/polyoxyethylene-10-stearyl ether) were used to deliver a drug into the dermis of mouse skin. Such formulations with siRNA are useful for treating a dermatological disorder.

[0628] Liposomes that include siRNA can be made highly deformable. Such deformability can enable the liposomes to penetrate through pore that are smaller than the average radius of the liposome. For example, transfersomes are a type of deformable liposomes. Transfersomes can be made by adding surface edge activators, usually surfactants, to a standard liposomal composition. Transfersomes that include siRNA can be delivered, for example, subcutaneously by infection in order to deliver siRNA to keratinocytes in the skin. In order to cross intact mammalian skin, lipid vesicles must pass through a series of fine pores, each with a diameter less than 50 nm, under the influence of a suitable transdermal gradient. In addition, due to the lipid properties, these transfersomes can be self-optimizing (adaptive to the shape of pores, e.g., in the skin), self-repairing, and can frequently reach their targets without fragmenting, and often self-loading.

[0629] Other formulations amenable to the present invention are described in U.S. provisional application Ser. No. 61/018,616, filed Jan. 2, 2008; 61/018,611, filed Jan. 2, 2008; 61/039,748, filed Mar. 26, 2008; 61/047,087, filed Apr. 22, 2008 and 61/051,528, filed May 8, 2008. PCT application no PCT/US2007/080331, filed Oct. 3, 2007 also describes formulations that are amenable to the present invention.

[0630] Surfactants. For ease of exposition the formulations, compositions and methods in this section are discussed largely with regard to unmodified siRNA compounds. It may be understood, however, that these formulations, compositions and methods can be practiced with other siRNA compounds, e.g., modified siRNA compounds, and such practice is within the scope of the invention. Surfactants find wide application in formulations such as emulsions (including microemulsions) and liposomes (see above). siRNA (or a precursor, e.g., a larger dsiRNA which can be processed into a siRNA, or a DNA which encodes a siRNA or precursor) compositions can include a surfactant. In some embodiments, the siRNA is formulated as an emulsion that includes a surfactant. The most common way of classifying and ranking the properties of the many different types of surfactants, both natural and synthetic, is by the use of the hydrophile/lipophile balance (HLB). The nature of the hydrophilic group provides the most useful means for categorizing the different surfactants used in formulations (Rieger, in “Pharmaceutical Dosage Forms,” Marcel Dekker, Inc., New York, NY, 1988, p. 285).

[0631] If the surfactant molecule is not ionized, it is classified as a nonionic surfactant. Nonionic surfactants find wide application in pharmaceutical products and are usable over a wide range of pH values. In general, their HLB values range from 2 to about 18 depending on their structure. Nonionic surfactants include nonionic esters such as ethylene glycol esters, propylene glycol esters, glyceryl esters, polyglyceryl esters, sorbitan esters, sucrose esters, and ethoxylated esters. Nonionic alkanolamides and ethers such as fatty alcohol ethoxylates, propoxylated alcohols, and ethoxylated/propoxylated block polymers are also included in this class. The polyoxyethylene surfactants are the most popular members of the nonionic surfactant class.

[0632] If the surfactant molecule carries a negative charge when it is dissolved or dispersed in water, the surfactant is classified as anionic. Anionic surfactants include carboxylates such as soaps, acyl lactylates, acyl amides of amino acids, esters of sulfuric acid such as alkyl sulfates and ethoxylated alkyl sulfates, sulfonates such as alkyl benzene sulfonates, acyl isethionates, acyl taurates and sulfosuccinates, and phosphates. The most important members of the anionic surfactant class are the alkyl sulfates and the soaps.

[0633] If the surfactant molecule carries a positive charge when it is dissolved or dispersed in water, the surfactant is classified as cationic. Cationic surfactants include quaternary ammonium salts and ethoxylated amines. The quaternary ammonium salts are the most used members of this class.

[0634] If the surfactant molecule has the ability to carry either a positive or negative charge, the surfactant is classified as amphoteric. Amphoteric surfactants include acrylic acid derivatives, substituted alkylamides, N-alkylbetaines and phosphatides.

[0635] The use of surfactants in drug products, formulations and in emulsions has been reviewed (Rieger, in “Pharmaceutical Dosage Forms,” Marcel Dekker, Inc., New York, NY, 1988, p. 285).

[0636] Micelles and other Membranous Formulations. For ease of exposition the micelles and other formulations, compositions and methods in this section are discussed largely with regard to unmodified siRNA compounds. It may be understood, however, that these micelles and other formulations, compositions and methods can be practiced with other siRNA compounds, e.g., modified siRNA compounds, and such practice is within the invention. The siRNA compound, e.g., a double-stranded siRNA compound, or ssiRNA compound, (e.g., a precursor, e.g., a larger siRNA compound which can be processed into a ssiRNA compound, or a DNA which encodes an siRNA compound, e.g., a double-stranded siRNA compound, or ssiRNA compound, or precursor thereof)) composition can be provided as a micellar formulation. “Micelles” are defined herein as a particular type of molecular assembly in which amphipathic molecules are arranged in a spherical structure such that all the hydrophobic portions of the molecules are directed inward, leaving the hydrophilic portions in contact with the surrounding aqueous phase. The converse arrangement exists if the environment is hydrophobic.

[0637] A mixed micellar formulation suitable for delivery through transdermal membranes may be prepared by mixing an aqueous solution of the siRNA composition, an alkali metal C₈ to C₂₂ alkyl sulphate, and a micelle forming compounds. Exemplary micelle forming compounds include lecithin, hyaluronic acid, pharmaceutically acceptable salts of hyaluronic acid, glycolic acid, lactic acid, chamomile extract, cucumber extract, oleic acid, linoleic acid, linolenic acid, monoolein, monooleates, monolaurates, borage oil, evening of primrose oil, menthol, trihydroxy oxo cholanyl glycine and pharmaceutically acceptable salts thereof, glycerin, polyglycerin, lysine, polylysine, triolein, polyoxyethylene ethers and analogues thereof, polidocanol alkyl ethers and analogues thereof, chenodeoxycholate, deoxycholate, and mixtures thereof. The micelle forming compounds may be added at the same time or after addition of the alkali metal alkyl sulphate. Mixed micelles will form with substantially any kind of mixing of the ingredients but vigorous mixing in order to provide smaller size micelles.

[0638] In one method a first micellar composition is prepared which contains the siRNA composition and at least the alkali metal alkyl sulphate. The first micellar composition is then mixed with at least three micelle forming compounds to form a mixed micellar composition. In another method, the micellar composition is prepared by mixing the siRNA composition, the alkali metal alkyl sulphate and at least one of the micelle forming compounds, followed by addition of the remaining micelle forming compounds, with vigorous mixing.

[0639] Phenol and/or m-cresol may be added to the mixed micellar composition to stabilize the formulation and protect against bacterial growth. Alternatively, phenol and/or m-cresol may be added with the micelle forming ingredients. An isotonic agent such as glycerin may also be added after formation of the mixed micellar composition.

[0640] For delivery of the micellar formulation as a spray, the formulation can be put into an aerosol dispenser and the dispenser is charged with a propellant. The propellant, which is under pressure, is in liquid form in the dispenser. The ratios of the ingredients are adjusted so that the aqueous and propellant phases become one, i.e., there is one phase. If there are two phases, it is necessary to shake the dispenser prior to dispensing a portion of the contents, e.g., through a metered valve. The dispensed dose of pharmaceutical agent is propelled from the metered valve in a fine spray.

[0641] Propellants may include hydrogen-containing chlorofluorocarbons, hydrogen-containing fluorocarbons, dimethyl ether and diethyl ether. In certain embodiments, HFA 134a (1,1,1,2 tetrafluoroethane) may be used.

[0642] The specific concentrations of the essential ingredients can be determined by relatively straightforward experimentation. For absorption through the oral cavities, it is often desirable to increase, e.g., at least double or triple, the dosage for through injection or administration through the gastrointestinal tract.

[0643] Particles. For ease of exposition the particles, formulations, compositions and methods in this section are discussed largely with regard to modified siRNA compounds. It may be understood, however, that these particles, formulations, compositions and methods can be practiced with other siRNA compounds, e.g., unmodified siRNA compounds, and such practice is within the invention. In another embodiment, an siRNA compound, e.g., a double-stranded siRNA compound, or ssiRNA compound, (e.g., a precursor, e.g., a larger siRNA compound which can be processed into a ssiRNA compound, or a DNA which encodes an siRNA compound, e.g., a double-stranded siRNA compound, or ssiRNA compound, or precursor thereof) preparations may be incorporated into a particle, e.g., a microparticle. Microparticles can be produced by spray-drying, but may also be produced by other methods including lyophilization, evaporation, fluid bed drying, vacuum drying, or a combination of these techniques.

### Pharmaceutical Compositions

[0644] The iRNA agents of the invention may be formulated for pharmaceutical use. The present invention further relates to a pharmaceutical composition comprising the dsRNA molecule as defined herein. Pharmaceutically acceptable compositions comprise a therapeutically-effective amount of one or more of the dsRNA molecules in any of the preceding embodiments, taken alone or formulated together with one or more pharmaceutically acceptable carriers (additives), excipient and/or diluents.

[0645] The pharmaceutical compositions may be specially formulated for administration in solid or liquid form, including those adapted for the following: (1) oral administration, for example, drenches (aqueous or non-aqueous solutions or suspensions), tablets, e.g., those targeted for buccal, sublingual, and systemic absorption, boluses, powders, granules, pastes for application to the tongue; (2) parenteral administration, for example, by subcutaneous, intramuscular, intravenous or epidural injection as, for example, a sterile solution or suspension, or sustained-release formulation; (3) topical application, for example, as a cream, ointment, or a controlled-release patch or spray applied to the skin; (4) intravaginally or intrarectally, for example, as a pessary, cream or foam; (5) sublingually; (6) ocularly; (7) transdermally; or (8) nasally. Delivery using subcutaneous or intravenous methods can be particularly advantageous.

[0646] The phrase “therapeutically-effective amount” as used herein means that amount of a compound, material, or composition comprising a compound of the invention which is effective for producing some desired therapeutic effect in at least a sub-population of cells in an animal at a reasonable benefit/risk ratio applicable to any medical treatment.

[0647] The phrase “pharmaceutically acceptable” is employed herein to refer to those compounds, materials, compositions, and/or dosage forms which are, within the scope of sound medical judgment, suitable for use in contact with the tissues of human beings and animals without excessive toxicity, irritation, allergic response, or other problem or complication, commensurate with a reasonable benefit/risk ratio.

[0648] The phrase “pharmaceutically-acceptable carrier” as used herein means a pharmaceutically-acceptable material, composition or vehicle, such as a liquid or solid filler, diluent, excipient, manufacturing aid (e.g., lubricant, talc magnesium, calcium or zinc stearate, or steric acid), or solvent encapsulating material, involved in carrying or transporting the subject compound from one organ, or portion of the body, to another organ, or portion of the body. Each carrier must be “acceptable” in the sense of being compatible with the other ingredients of the formulation and not injurious to the patient. Some examples of materials which can serve as pharmaceutically-acceptable carriers include: (1) sugars, such as lactose, glucose and sucrose; (2) starches, such as corn starch and potato starch; (3) cellulose, and its derivatives, such as sodium carboxymethyl cellulose, ethyl cellulose and cellulose acetate; (4) powdered tragacanth; (5) malt; (6) gelatin; (7) lubricating agents, such as magnesium state, sodium lauryl sulfate and talc; (8) excipients, such as cocoa butter and suppository waxes; (9) oils, such as peanut oil, cottonseed oil, safflower oil, sesame oil, olive oil, corn oil and soybean oil; (10) glycols, such as propylene glycol; (11) polyols, such as glycerin, sorbitol, mannitol and polyethylene glycol; (12) esters, such as ethyl oleate and ethyl laurate; (13) agar; (14) buffering agents, such as magnesium hydroxide and aluminum hydroxide; (15) alginic acid; (16) pyrogen-free water; (17) isotonic saline; (18) Ringer's solution; (19) ethyl alcohol; (20) pH buffered solutions; (21) polyesters, polycarbonates and/or polyanhydrides; (22) bulking agents, such as polypeptides and amino acids (23) serum component, such as serum albumin, HDL and LDL; and (22) other non-toxic compatible substances employed in pharmaceutical formulations.

[0649] The formulations may conveniently be presented in unit dosage form and may be prepared by any methods well known in the art of pharmacy. The amount of active ingredient which can be combined with a carrier material to produce a single dosage form will vary depending upon the host being treated, the particular mode of administration. The amount of active ingredient which can be combined with a carrier material to produce a single dosage form will generally be that amount of the compound which produces a therapeutic effect. Generally, out of one hundred percent, this amount will range from about 0.1 percent to about ninety-nine percent of active ingredient, preferably from about 5 percent to about 70 percent, most preferably from about 10 percent to about 30 percent.

[0650] In certain embodiments, a formulation of the present invention comprises an excipient selected from the group consisting of cyclodextrins, celluloses, liposomes, micelle forming agents, e.g., bile acids, and polymeric carriers, e.g., polyesters and polyanhydrides; and a compound of the present invention. In certain embodiments, an aforementioned formulation renders orally bioavailable a compound of the present invention.

[0651] iRNA agent preparation can be formulated in combination with another agent, e.g., another therapeutic agent or an agent that stabilizes a iRNA, e.g., a protein that complexes with iRNA to form an iRNP. Still other agents include chelating agents, e.g., EDTA (e.g., to remove divalent cations such as Mg²⁺), salts, RNAse inhibitors (e.g., a broad specificity RNAse inhibitor such as RNAsin) and so forth.

[0652] Methods of preparing these formulations or compositions include the step of bringing into association a compound of the present invention with the carrier and, optionally, one or more accessory ingredients. In general, the formulations are prepared by uniformly and intimately bringing into association a compound of the present invention with liquid carriers, or finely divided solid carriers, or both, and then, if necessary, shaping the product.

[0653] In some cases, in order to prolong the effect of a drug, it is desirable to slow the absorption of the drug from subcutaneous or intramuscular injection. This may be accomplished by the use of a liquid suspension of crystalline or amorphous material having poor water solubility. The rate of absorption of the drug then depends upon its rate of dissolution which, in turn, may depend upon crystal size and crystalline form. Alternatively, delayed absorption of a parenterally-administered drug form is accomplished by dissolving or suspending the drug in an oil vehicle.

[0654] The compounds according to the invention may be formulated for administration in any convenient way for use in human or veterinary medicine, by analogy with other pharmaceuticals.

[0655] The term “treatment” is intended to encompass also prophylaxis, therapy and cure. The patient receiving this treatment is any animal in need, including primates, in particular humans, and other mammals such as equines, cattle, swine and sheep; and poultry and pets in general.

[0656] Double-stranded RNAi agents are produced in a cell in vivo, e.g., from exogenous DNA templates that are delivered into the cell. For example, the DNA templates can be inserted into vectors and used as gene therapy vectors. Gene therapy vectors can be delivered to a subject by, for example, intravenous injection, local administration (U.S. Pat. No. 5,328,470, which is incorporated by reference in its entirety), or by stereotactic injection (see, e.g., Chen et al. (1994) Proc. Natl. Acad. Sci. USA 91:3054-3057, which is incorporated by reference in its entirety). The pharmaceutical preparation of the gene therapy vector can include the gene therapy vector in an acceptable diluent, or can comprise a slow release matrix in which the gene delivery vehicle is imbedded. The DNA templates, for example, can include two transcription units, one that produces a transcript that includes the top strand of a dsRNA molecule and one that produces a transcript that includes the bottom strand of a dsRNA molecule. When the templates are transcribed, the dsRNA molecule is produced, and processed into siRNA agent fragments that mediate gene silencing.

### Routes of Delivery

[0657] The dsRNA molecule as defined herein or a pharmaceutical composition comprising a dsRNA molecule as defined herein can be administered to a subject using different routes of delivery. A composition that includes an iRNA can be delivered to a subject by a variety of routes. Exemplary routes include: intravenous, subcutaneous, topical, rectal, anal, vaginal, nasal, pulmonary, ocular.

[0658] The iRNA molecules and/or the dsRNA molecule of the invention can be incorporated into pharmaceutical compositions suitable for administration. Such compositions typically include one or more species of iRNA and a pharmaceutically acceptable carrier. As used herein the language “pharmaceutically acceptable carrier” is intended to include any and all solvents, dispersion media, coatings, antibacterial and antifungal agents, isotonic and absorption delaying agents, and the like, compatible with pharmaceutical administration. The use of such media and agents for pharmaceutically active substances is well known in the art. Except insofar as any conventional media or agent is incompatible with the active compound, use thereof in the compositions is contemplated. Supplementary active compounds can also be incorporated into the compositions.

[0659] The compositions of the present invention may be administered in a number of ways depending upon whether local or systemic treatment is desired and upon the area to be treated. Administration may be topical (including ophthalmic, vaginal, rectal, intranasal, transdermal), oral or parenteral. Parenteral administration includes intravenous drip, subcutaneous, intraperitoneal or intramuscular injection, or intrathecal or intraventricular administration.

[0660] The route and site of administration may be chosen to enhance targeting. For example, to target muscle cells, intramuscular injection into the muscles of interest would be a logical choice. Lung cells might be targeted by administering the iRNA in aerosol form. The vascular endothelial cells could be targeted by coating a balloon catheter with the iRNA and mechanically introducing the DNA.

### Dosage

[0661] In one aspect, the invention features a method of administering a dsRNA molecule, e.g., a siRNA agent, to a subject (e.g., a human subject). In another aspect, the present invention relates to a dsRNA molecule as defined herein for use in inhibiting expression of a target gene in a subject. The method or the medical use includes administering a unit dose of the dsRNA molecule, e.g., a siRNA agent, e.g., double stranded siRNA agent that (a) the double-stranded part is 14-40 nucleotides (nt) long, for example, 21-23 nt, (b) is complementary to a target RNA (e.g., an endogenous or pathogen target RNA), and, optionally, (c) includes at least one 3′ overhang 1-5 nucleotide long. In some embodiments, the unit dose is less than 10 mg per kg of bodyweight, or less than 10, 5, 2, 1, 0.5, 0.1, 0.05, 0.01, 0.005, 0.001, 0.0005, 0.0001, 0.00005 or 0.00001 mg per kg of bodyweight, and less than 200 nmole of RNA agent (e.g., about 4.4×10¹⁶ copies) per kg of bodyweight, or less than 1500, 750, 300, 150, 75, 15, 7.5, 1.5, 0.75, 0.15, 0.075, 0.015, 0.0075, 0.0015, 0.00075, 0.00015 nmole of RNA agent per kg of bodyweight.

[0662] The defined amount can be an amount effective to treat or prevent a disease or disorder, e.g., a disease or disorder associated with the target RNA. The unit dose, for example, can be administered by injection (e.g., intravenous, subcutaneous or intramuscular), an inhaled dose, or a topical application. In some embodiments dosages may be less than 10, 5, 2, 1, or 0.1 mg/kg of body weight.

[0663] In some embodiments, the unit dose is administered less frequently than once a day, e.g., less than every 2, 4, 8 or 30 days. In another embodiment, the unit dose is not administered with a frequency (e.g., not a regular frequency). For example, the unit dose may be administered a single time.

[0664] In some embodiments, the effective dose is administered with other traditional therapeutic modalities. In some embodiments, the subject has a viral infection and the modality is an antiviral agent other than a dsRNA molecule, e.g., other than a siRNA agent. In another embodiment, the subject has atherosclerosis and the effective dose of a dsRNA molecule, e.g., a siRNA agent, is administered in combination with, e.g., after surgical intervention, e.g., angioplasty.

[0665] In some embodiments, a subject is administered an initial dose and one or more maintenance doses of a dsRNA molecule, e.g., a siRNA agent, (e.g., a precursor, e.g., a larger dsRNA molecule which can be processed into a siRNA agent, or a DNA which encodes a dsRNA molecule, e.g., a siRNA agent, or precursor thereof). The maintenance dose or doses can be the same or lower than the initial dose, e.g., one-half less of the initial dose. A maintenance regimen can include treating the subject with a dose or doses ranging from 0.01 μg to 15 mg/kg of body weight per day, e.g., 10, 1, 0.1, 0.01, 0.001, or 0.00001 mg per kg of bodyweight per day. The maintenance doses are, for example, administered no more than once every 2, 5, 10, or 30 days. Further, the treatment regimen may last for a period of time which will vary depending upon the nature of the particular disease, its severity and the overall condition of the patient. In certain embodiments the dosage may be delivered no more than once per day, e.g., no more than once per 24, 36, 48, or more hours, e.g., no more than once for every 5 or 8 days. Following treatment, the patient can be monitored for changes in his condition and for alleviation of the symptoms of the disease state. The dosage of the compound may either be increased in the event the patient does not respond significantly to current dosage levels, or the dose may be decreased if an alleviation of the symptoms of the disease state is observed, if the disease state has been ablated, or if undesired side-effects are observed.

[0666] The effective dose can be administered in a single dose or in two or more doses, as desired or considered appropriate under the specific circumstances. If desired to facilitate repeated or frequent infusions, implantation of a delivery device, e.g., a pump, semi-permanent stent (e.g., intravenous, intraperitoneal, intracisternal or intracapsular), or reservoir may be advisable.

[0667] In some embodiments, the composition includes a plurality of dsRNA molecule species. In another embodiment, the dsRNA molecule species has sequences that are non-overlapping and non-adjacent to another species with respect to a naturally occurring target sequence. In another embodiment, the plurality of dsRNA molecule species is specific for different naturally occurring target genes. In another embodiment, the dsRNA molecule is allele specific.

[0668] The dsRNA molecules of the invention described herein can be administered to mammals, particularly large mammals such as nonhuman primates or humans in a number of ways.

[0669] In some embodiments, the administration of the dsRNA molecule, e.g., a siRNA agent, composition is parenteral, e.g., intravenous (e.g., as a bolus or as a diffusible infusion), intradermal, intraperitoneal, intramuscular, intrathecal, intraventricular, intracranial, subcutaneous, transmucosal, buccal, sublingual, endoscopic, rectal, oral, vaginal, topical, pulmonary, intranasal, urethral or ocular. Administration can be provided by the subject or by another person, e.g., a health care provider. The medication can be provided in measured doses or in a dispenser which delivers a metered dose. Selected modes of delivery are discussed in more detail below.

[0670] The invention provides methods, compositions, and kits, for rectal administration or delivery of dsRNA molecules described herein

[0671] In particular embodiments, the present invention relates to the dsRNA molecules of the present invention for use in the methods described above.

### Methods of Inhibiting Expression of the Target Gene

[0672] Embodiments of the invention also relate to methods for inhibiting the expression of a target gene. The method comprises the step of administering the dsRNA molecules in any of the preceding embodiments, in an amount sufficient to inhibit expression of the target gene. The present invention further relates to a use of a dsRNA molecule as defined herein for inhibiting expression of a target gene in a target cell. In a preferred embodiment, the present invention further relates to a use of a dsRNA molecule for inhibiting expression of a target gene in a target cell in vitro.

[0673] Another aspect the invention relates to a method of modulating the expression of a target gene in a cell, comprising providing to said cell a dsRNA molecule of this invention. In some embodiments, the target gene is selected from the group consisting of Factor VII, Eg5, PCSK9, TPX2, apoB, SAA, TTR, RSV, PDGF beta gene, Erb-B gene, Src gene, CRK gene, GRB2 gene, RAS gene, MEKK gene, JNK gene, RAF gene, Erk1/2 gene, PCNA(p21) gene, MYB gene, JUN gene, FOS gene, BCL-2 gene, hepcidin, Activated Protein C, Cyclin D gene, VEGF gene, EGFR gene, Cyclin A gene, Cyclin E gene, WNT-1 gene, beta-catenin gene, c-MET gene, PKC gene, NFKB gene, STAT3 gene, survivin gene, Her2/Neu gene, topoisomerase I gene, topoisomerase II alpha gene, mutations in the p73 gene, mutations in the p21(WAF1/CIP1) gene, mutations in the p27(KIP1) gene, mutations in the PPM1D gene, mutations in the RAS gene, mutations in the caveolin I gene, mutations in the MIB I gene, mutations in the MTAI gene, mutations in the M68 gene, mutations in tumor suppressor genes, and mutations in the p53 tumor suppressor gene.

[0674] In particular embodiments, the present invention relates to the dsRNA molecules of the present invention for use in the methods described above.

[0675] In some other aspects the invention relates to a method for preparing oligonucleotides conjugated with a ligand or a second oligonucleotide. The method comprises copper free “click” conjugation. A generic version of the method is shown in Scheme 1.

[chemical structure]

[0676] As shown, a first oligonucleotide comprising dibenzylcyclooctyne (DBCO) moiety is reacted with a ligand or a second oligonucleotide, wherein the ligand and the second oligonucleotide comprises an azide functional group. To prepare the conjugate, the DBCO moiety can be attached to the oligonucleotide on either the 3′ end or the 5′ end. In some embodiments the oligonucleotide comprises 3 consecutive 2′-F-nucleotides (e.g., a 2′-F nucleotide triplet) at either the 3′ or 5′ end, and the DBCO moiety is conjugated to the terminal 2′-F nucleotide. The three 2′-F nucleotides can all be the same or they can all be different. Alternatively, two of the three 2′-F can be the same and can be arranged in any linear order with respect to each other and the nucleotide and DBCO moiety. The method can be useful in preparing longmer strands for Bis-RNAi synthesis. Accordingly, the DBCO moiety can be placed anywhere at the 3′ or 5′ end of the sense or antisense strand for preparing Bis-RNAi.

[0677] The invention is further illustrated by the following examples, which should not be construed as further limiting. The contents of all references, pending patent applications and published patents, cited throughout this application are hereby expressly incorporated by reference.

### EXAMPLES

### Example 1: Design and Synthesis of Novel Modified Unlocked Nucleic Acid (mUNA) and Glycol Nucleic Acid (GNA) Building Blocks

[0678] Synthetic approaches for novel mUNA and GNA derivatives are shown below. Briefly, nucleoside derivatives with substituted furanose ring and/or modified bases can be oxidatively cleaved at their 2′- and 3′-carbon-carbon bond by NaIO₄ followed by NaBH₄ reduction to give novel acyclic nucleoside derivatives. These nucleosides, nucleoside prodrugs with 5′-phosphate derivatives, and 3′-phosphoramidites can be applicable to oligonucleotide therapeutics and as an antiviral agent.

[0679] General synthetic approach for modified UNA building blocks is shown in Scheme 2.

[chemical structure]

Exemplary mUNA Building Blocks
Example of mUNA Building Block for Oligonucleotide Synthesis

[chemical structure]

[chemical structure]

[chemical structure]

4′-Modified mUNA Building Blocks (1)

[chemical structure]

### Wherein:

[0680] R is H, OH; OMe; Cl, F; OH; O—(CH₂)₂OMe; SMe, NMe₂; NH₂; Me; CCH (alkyne), O-nPr; O-alkyl; or O-alkylamino;
[0681] R′ is H or Me;
[0682] B is A; C; 5-Me-C; G; I; U; T; Y; 2-thiouridine; 4-thiouridine; C5-modified pyrimidines; C2-modified purines; N8-modified purines; phenoxazine; G-clamp; non-canonical mono, bi and tricyclic heterocycles; pseudouracil; isoC; isoG; 2,6-diaminopurine; pseudocytosine; 2-aminopurine; xanthosine; N6-alkyl-A; O6-alkyl-G; 2-thiouridine; 4-thiouridine; C5-modified pyrimidines; C2-modified purines; N8-modified purines; 7-deazapurines, phenoxazine; G-clamp; or non-canonical mono, bi and tricyclic heterocycles; and
[0683] Stereochemistry is R or S and combination of R and S for the unspecified chiral centers.
   4′-Modified mUNA Building Blocks (2)

[chemical structure]

### Wherein:

[0684] R is H, OH; OMe; Cl, F; OH; O—(CH₂)₂OMe; SMe, NMe₂; NH₂; Me; CCH (alkyne), O-nPr; O-alkyl; or O-alkylamino;
[0685] R′ is H or Me;
[0686] Bis A; C; 5-Me-C; G; I; U; T; Y; 2-thiouridine; 4-thiouridine; C5-modified pyrimidines; C2-modified purines; N8-modified purines; phenoxazine; G-clamp; non-canonical mono, bi and tricyclic heterocycles; pseudouracil; isoC; isoG; 2,6-diaminopurine; pseudocytosine; 2-aminopurine; xanthosine; N6-alkyl-A; O6-alkyl-G; 2-thiouridine; 4-thiouridine; C5-modified pyrimidines; C2-modified purines; N8-modified purines; 7-deazapurines, phenoxazine; G-clamp; or non-canonical mono, bi and tricyclic heterocycles; and
[0687] Stereochemistry is R or S and combination of R and S for the unspecified chiral centers.
   4′-Modified mUNA Building Blocks (3)

[chemical structure]

### Wherein:

[0688] R is H, OMe; F; OH; O—(CH₂)₂OMe; SMe, NMe₂; NH₂; Me; O-nPr; O-alkyl; or O-alkylamino;
[0689] R′ is H or Me;
[0690] B is A; C; 5-Me-C; G; I; U; T; Y; 2-thiouridine; 4-thiouridine; C5-modified pyrimidines; C2-modified purines; N8-modified purines; phenoxazine; G-clamp; non-canonical mono, bi and tricyclic heterocycles; pseudouracil; isoC; isoG; 2,6-diaminopurine; pseudocytosine; 2-aminopurine; xanthosine; N6-alkyl-A; O6-alkyl-G; or 7-deazapurines; and
[0691] Stereochemistry is R or S and combination of R and S for the unspecified chiral centers.
   4′-Modified mUNA Building Blocks (4)

[chemical structure]

[chemical structure]

[chemical structure]

### Wherein:

[0692] R is H; OMe; OEt, F; OTBDMS; O—(CH₂)₂OMe; SMe, NMe₂; NPhth; Me; O-nPr; O-alkyl; or 0-alkylamino;
[0693] R′ is H or Me;
[0694] B^{p} is A^{Bz}; C^{Ac}; 5-Me-C^{Bz}; G; I; U; T; Y; 2-thiouridine; 4-thiouridine; C5-modified pyrimidines; C2-modified purines; N8-modified purines; phenoxazine; G-clamp; non-canonical mono, bi and tricyclic heterocycles; pseudouracil isoC; isoG; 2,6-diaminopurine; pseudocytosine; 2-aminopurine; xanthosine; N6-alkyl-A; O6-alkyl-G; or 7-deazapurines; and
[0695] Stereochemistry is R or S and combination of R and S for the unspecified chiral centers.
   4′-Modified mUNA Building Blocks (5)

[chemical structure]

[chemical structure]

### Wherein:

[0696] R is OMe; OEt, F; OTBDMS; O—(CH₂)₂OMe; SMe, NMe₂; NPhth; Me; O-nPr; O-alkyl; or O-alkylamino;
[0697] R′ is H or Me;
[0698] B^{p} is A^{Bz}; C^{Ac}; 5-Me-C^{Bz}; G; I; U; T; Y; 2-thiouridine; 4-thiouridine; C5-modified pyrimidines; C2-modified purines; N8-modified purines; phenoxazine; G-clamp; non-canonical mono, bi and tricyclic heterocycles; pseudouracil isoC; isoG; 2,6-diaminopurine; pseudocytosine; 2-aminopurine; xanthosine; N6-alkyl-A; O6-alkyl-G; or 7-deazapurines; and
[0699] Stereochemistry is R or S and combination of R and S for the unspecified chiral centers
   4′-Modified mUNA Building Blocks (6)

[chemical structure]

[chemical structure]

[chemical structure]

### Wherein:

[0700] R is H, OMe; OEt, F; OTBDMS; O—(CH₂)₂OMe; SMe, NMe₂; NPhth; Me; O-nPr; O-alkyl; or 0-alkylamino;
[0701] R′ is H or Me
[0702] B^{p} is A^{Bz}; C^{Ac}; 5-Me-C^{Bz}; G; I; U; T; Y; 2-thiouridine; 4-thiouridine; C5-modified pyrimidines; C2-modified purines; N8-modified purines; phenoxazine; G-clamp; non-canonical mono, bi and tricyclic heterocycles; pseudouracil isoC; isoG; 2,6-diaminopurine; pseudocytosine; 2-aminopurine; xanthosine; N6-alkyl-A; O6-alkyl-G; or 7-deazapurines; and
[0703] Stereochemistry is R or S and combination of R and S for the unspecified chiral centers
   Other mUNA Building Blocks with 3′-Phosphoramidite Group

[chemical structure]

[chemical structure]

[0704] R₁, R₂=OTBS; F, H, Me, Cl
[0705] B=A^{Bz}; C^{Bz}; 5-Me-C^{Bz}; G; I; U; T; Y; 2-thiouridine; 4-thiouridine; C5-modified pyrimidines; C2-modified purines; N8-modified purines; phenoxazine; G-clamp; non-canonical mono, bi and tricyclic heterocycles; pseudouracil isoC; isoG; 2,6-diaminopurine; pseudocytosine; 2-aminopurine; xanthosine; N6-alkyl-A; O6-alkyl-G; 7-deazapurines

[chemical structure]

[chemical structure]

[chemical structure]

[chemical structure]

[chemical structure]

[chemical structure]

[chemical structure]

[chemical structure]

[chemical structure]

Other mUNA Building Blocks with 2′-Phosphoramidite Group

[chemical structure]

[chemical structure]

[0706] R₁, R₂=OTBS; F, H, Me, Cl
[0707] R₃=H, Me
[0708] B=A^{Bz}; C^{Bz}; 5-Me-C^{Bz}; G; I; U; T; Y; 2-thiouridine; 4-thiouridine; C5-modified pyrimidines; C2-modified purines; N8-modified purines; phenoxazine; G-clamp; non-canonical mono, bi and tricyclic heterocycles; pseudouracil isoC; isoG; 2,6-diaminopurine; pseudocytosine; 2-aminopurine; xanthosine; N6-alkyl-A; O6-alkyl-G; 7-deazapurines

[chemical structure]

[chemical structure]

[chemical structure]

[chemical structure]

[chemical structure]

[chemical structure]

### Modified UNA Nucleosides (1)

[chemical structure]

### Wherein:

[0709] R is H, OH; OMe; Cl, F; OH; O—(CH₂)₂OMe; SMe, NMe₂; NH₂; Me; CCH (alkyne), O-nPr; O-alkyl; or O-alkylamino;
[0710] R′ is H or Me;
[0711] B is A; C; 5-Me-C; G; I; U; T; Y; 2-thiouridine; 4-thiouridine; C5-modified pyrimidines; C2-modified purines; N8-modified purines; phenoxazine; G-clamp; non-canonical mono, bi and tricyclic heterocycles; pseudouracil; isoC; isoG; 2,6-diaminopurine; pseudocytosine; 2-aminopurine; xanthosine; N6-alkyl-A; O6-alkyl-G; 2-thiouridine; 4-thiouridine; C5-modified pyrimidines; C2-modified purines; N8-modified purines; 7-deazapurines, phenoxazine; G-clamp; or non-canonical mono, bi and tricyclic heterocycles; and
[0712] Stereochemistry is R or S and combination of R and S for the unspecified chiral centers

### Modified UNA Nucleosides (32)

[chemical structure]

### Wherein:

[0713] R is H, OH; OMe; Cl, F; OH; O—(CH₂)₂OMe; SMe, NMe₂; NH₂; Me; CCH (alkyne), O-nPr; O-alkyl; O-alkylamino;
[0714] R′ is H or Me;
[0715] B is A; C; 5-Me-C; G; I; U; T; Y; 2-thiouridine; 4-thiouridine; C5-modified pyrimidines; C2-modified purines; N8-modified purines; phenoxazine; G-clamp; non-canonical mono, bi and tricyclic heterocycles; pseudouracil; isoC; isoG; 2,6-diaminopurine; pseudocytosine; 2-aminopurine; xanthosine; N6-alkyl-A; O6-alkyl-G; 2-thiouridine; 4-thiouridine; C5-modified pyrimidines; C2-modified purines; N8-modified purines; 7-deazapurines, phenoxazine; G-clamp; or non-canonical mono, bi and tricyclic heterocycles; and
[0716] Stereochemistry is R or S and combination of R and S for the unspecified chiral centers

### Modified UNA Nucleosides (3)

[chemical structure]

### Wherein:

[0717] R is H, OMe; F; OH; O—(CH₂)₂OMe; SMe, NMe₂; NH₂; Me; O-nPr; O-alkyl; or O-alkylamino;
[0718] R′ is H or Me;
[0719] B is A; C; 5-Me-C; G; I; U; T; Y; 2-thiouridine; 4-thiouridine; C5-modified pyrimidines; C2-modified purines; N8-modified purines; phenoxazine; G-clamp; non-canonical mono, bi and tricyclic heterocycles; pseudouracil; isoC; isoG; 2,6-diaminopurine; pseudocytosine; 2-aminopurine; xanthosine; N6-alkyl-A; O6-alkyl-G; or 7-deazapurines; and
[0720] Stereochemistry is R or S and combination of R and S for the unspecified chiral centers
   Modified UNA Free Nucleosides with 5′-Phosphate Analogs

[chemical structure]

[0721] R₁, R₂=OTBS; F, H, Me, Cl
[0722] B=A^{Bz}; C^{Bz}; 5-Me-C^{Bz}; G; I; U; T; Y; 2-thiouridine; 4-thiouridine; C5-modified pyrimidines; C2-modified purines; N8-modified purines; phenoxazine; G-clamp; non-canonical mono, bi and tricyclic heterocycles; pseudouracil isoC; isoG; 2,6-diaminopurine; pseudocytosine; 2-aminopurine; xanthosine; N6-alkyl-A; O6-alkyl-G; 7-deazapurines
   [0723] X=DMTr,

[chemical structure]

[chemical structure]

[0724] R₁, R₂=OTBS; F, H, Me, Cl
[0725] R₃=H, Me
[0726] B=A^{Bz}; C^{Bz}; 5-Me-C^{Bz}; G; I; U; T; Y; 2-thiouridine; 4-thiouridine; C5-modified pyrimidines; C2-modified purines; N8-modified purines; phenoxazine; G-clamp; non-canonical mono, bi and tricyclic heterocycles; pseudouracil isoC; isoG; 2,6-diaminopurine; pseudocytosine; 2-aminopurine; xanthosine; N6-alkyl-A; O6-alkyl-G; 7-deazapurines
[0727] X=DMTr,

[chemical structure]

[chemical structure]

[chemical structure]

### Example 2: Synthesis of Monomers

### Synthesis of 5′-(S)-Methyl-U-UNA Building Blocks

[chemical structure]

[0728] Synthesis of compound 3: To a solution of Compound 1 (20.0 g, 42.3 mmol) in anhydrous dichloromethane (500 mL) cooled to ° C., Dess-Martin periodinane (21.5 g, 50.8 mmol, 1.2 eq) was added. The reaction was stirred at 0° C. for 1 hour, warmed to room temperature, and stirred for additional 1.5 hours. The reaction was then quenched by slowly adding to a vigorously stirred mixture of 10% aq. Na₂S₂O₃ (300 mL) and saturated aq. NaHCO₃ (300 mL) at 0° C. and stirred for 1 hour. After quenching, the organic layer was extracted 3 times with DCM, dried over anhydrous Na₂SO₄, filtered, and concentrated under reduced pressure. Upon drying on high vacuum, product yielded as flakey white solid. The dried crude material was resuspended in anhydrous THF (300 mL) and the solution was added via cannula to a stirring solution of Me₃Al (2M in toluene, 63.5 mL, 126.9 mmol, 3 eq) in THF (300 mL) at 0° C. The crude material flask was rinsed with additional THF and added to the reaction via cannula. After stirring at 0° C. for 1 hour, the reaction was warmed to room temperature and allowed to stir overnight. The reaction brought to 0° C. and was quenched by gradually adding 20 mL of 1:1 solution of aq. H₃PO₄ (10%) and saturated aq. NH₄Cl. After the solvent was removed under reduced pressure, the crude residue was extracted with DCM and sat. NaHCO₃. The organic layer was separated, washed with brine, dried and filtered over anhydrous Na₂SO₄, and concentrated under reduced pressure. The crude material was purified by flash silica gel column chromatography (0-30% EtOAc in hexanes, 2% triethylamine) to obtain compound 3 as a white foam (5.85 g, 12.02 mmol, 25%; R_{f}=0.48, developed with 50% EtOAc in Hexanes). ¹H NMR (400 MHz, DMSO-d₆) δ 11.35 (s, 1H), 8.07 (d, J=8.1 Hz, 1H), 5.83 (d, J=6.0 Hz, 1H), 5.71 (d, J=8.1 Hz, 1H), 5.27 (d, J=4.2 Hz, 1H), 4.26 (dd, J=6.1, 4.4 Hz, 1H), 4.12 (dd, J=4.5, 2.5 Hz, 1H), 3.88-3.78 (m, 1H), 3.72 (t, J=2.2 Hz, 1H), 1.14 (d, J=6.4 Hz, 3H), 0.89 (s, 9H), 0.83 (s, 9H), 0.08 (d, J=3.6 Hz, 6H), −0.04 (s, 3H). ¹³C NMR (101 MHz, DMSO-d₆) δ 162.94, 150.74, 140.17, 102.05, 88.54, 86.43, 74.75, 72.90, 65.04, 25.70, 25.59, 19.98, 17.74, 17.60, −4.63, −4.77, −4.84, −5.07.

[0729] Synthesis of compound 4: To a solution of compound 3 (5.85 g, 12.02 mmol) in anhydrous THF (50 mL) and anhydrous pyridine (10 mL), DMTrCl (12.2 g, 36.1 mmol, 3 eq) and AgNO₃ (4.08 g, 24.0 mmol, 2 eq) were added, and the mixture was stirred overnight at ambient temperature. After 24 hours, additional DMTrCl (6.11 g, 18.0 mmol, 1.5 eq) and AgNO₃ (2.04 g, 12.0 mmol, 1.0 eq) was added to the reaction. The mixture was stirred at ambient temperature overnight. The mixture was filtered over celite, and the filter cake was washed with DCM. The filtrate was concentrated under reduced pressure, and the residue was extracted with DCM and saturated aq. NaHCO₃. The organic layer was washed with brine, dried and filtered over anhydrous Na₂SO₄, and concentrated. The crude residue was purified by flash column chromatography (0-25% EtOAc in Hexanes, 2% triethylamine) to obtain compound 4 as yellow foam (8.05 g, 10.2 mmol, 85%, R_{f}=0.35, developed with 33% EtOAc in hexanes).

[0730] Synthesis of compound 5: To a solution of compound 4 (8.05 g, 10.2 mmol) in THF (51 mL), TBAF (1M in THF, 25.5 mL, 25.5 mmol, 2 eq) was added. After stirring at room temperature overnight, the solvent was removed under reduced pressure. The crude residue was purified by flash column chromatography (0-100% EtOAc in hexane then 2.5% MeOH in EtOAC, 2% triethylamine) to obtain compound 5 as yellow-white foam (5.84 g, quant.; R_{f}=0.50, developed with 5% MeOH in EtOAc). ¹H NMR (500 MHz, DMSO-d₆) δ 11.41-11.34 (m, 1H), 7.57 (d, J=8.1 Hz, 1H), 7.46-7.40 (m, 2H), 7.30 (t, J=7.9 Hz, 6H), 7.21 (t, J=7.3 Hz, 1H), 6.88 (dd, J=8.8, 6.7 Hz, 4H), 5.68 (d, J=5.1 Hz, 1H), 5.58 (dd, J=8.0, 1.6 Hz, 1H), 5.39 (d, J=5.2 Hz, 1H), 5.03 (d, J=5.1 Hz, 1H), 4.01 (h, J=5.8 Hz, 2H), 3.74 (s, 3H), 3.72 (s, 4H), 3.61-3.51 (m, 1H), 0.67 (d, J=6.2 Hz, 3H). ¹³C NMR (126 MHz, DMSO-d₆) δ 162.93, 158.06, 150.67, 146.11, 140.47, 136.40, 136.30, 130.16, 130.08, 127.95, 127.61, 126.61, 112.99, 101.93, 87.25, 86.43, 85.81, 72.56, 69.24, 68.89, 55.00, 54.99, 17.09.

[0731] Synthesis of compound 6: To a solution of compound 5 (5.84 g, 10.42 mmol) in dioxane (135 mL) and H₂O (25 mL), NaIO₄ (2.45 g, 11.46 mmol, 1.1 eq) dissolved in H₂O (25 mL) was added. The bi-layer reaction mixture was vigorously stirred at ambient temperature for 4 hours. The reaction mixture was filtered through a sintered funnel, and the filter cake was washed with additional dioxane. To the filtrate was added NaBH₄ (0.434 g, 11.46 mmol, 1.1 eq). After stirring at ambient temperature for 2 hours, the mixture was cooled to 0° C. then quenched with 1:1 v/v AcOH:Pyridine buffer. After the solvent was removed under reduced pressure, the crude residue was extracted with EtOAc and saturated aq. NaHCO₃. The organic layer was separated, dried over anhydrous Na₂SO₄, filtered, and concentrated under reduced pressure. The crude material was purified by flash column chromatography (0-5% MeOH in DCM, 2% triethylamine), to obtain compound 6 as a white foam (5.01 g, 8.90 mmol, 85%; R_{f}=0.13 developed with 5% MeOH in DCM). ¹H NMR (400 MHz, DMSO-d₆) δ 11.14 (d, J=2.2 Hz, 1H), 7.35 (dd, J=8.0, 1.8 Hz, 3H), 7.30-7.15 (m, 7H), 6.90-6.78 (m, 4H), 5.64 (dd, J=6.4, 4.7 Hz, 1H), 5.47 (dd, J=8.0, 2.2 Hz, 1H), 5.01 (t, J=6.0 Hz, 1H), 4.68 (t, J=5.4 Hz, 1H), 3.82 (dd, J=11.7, 5.7, 2.2 Hz, 1H), 3.60-3.51 (m, 2H), 3.50-3.39 (m, 2H), 3.24-3.17 (m, 1H), 3.12-3.01 (m, 1H), 2.07 (s, 2H), 1.19 (t, J=7.3 Hz, 2H), 0.56 (d, J=6.3 Hz, 3H). ¹³C NMR (126 MHz, DMSO-d₆) δ 163.08, 158.09, 158.03, 150.80, 145.64, 140.57, 136.49, 136.11, 129.75, 129.60, 127.65, 127.62, 126.68, 113.02, 101.18, 85.80, 84.73, 81.69, 68.82, 61.24, 60.36, 54.98, 45.48, 39.24, 15.38, 8.49, 1.12.

[0732] Synthesis of compound 7: To a solution of compound 6 (5.01 g, 8.90 mmol) in anhydrous DCM (245 mL) and pyridine (7 mL), cooled to −78° C., benzoyl chloride (1.14 mL, 9.79 mmol, 1.1 eq) was slowly added. After stirring at −78° C. for 1 hour, reaction mixture was brought to 0° C., and quenched with EtOH (5 mL). The mixture was extracted with DCM and saturated aq. NaHCO₃. The organic layer was washed with brine, separated, dried over anhydrous Na₂SO₄, filtered, and concentrated. The crude residue was purified by flash column chromatography (0-75% EtOAC in hexanes) to yield compound 7 as a white foam (1.31 g, 1.96 mmol, 22%; R_{f}=0.32, developed with 50% EtOAc in hexanes). ¹H NMR (400 MHz, DMSO-d₆) δ 11.29-11.25 (m, 1H), 7.87 (dd, J=8.4, 1.4 Hz, 2H), 7.69-7.61 (m, 1H), 7.55-7.46 (m, 3H), 7.39-7.32 (m, 2H), 7.27 (d, J=1.0 Hz, 1H), 7.25 (d, J=1.7 Hz, 2H), 7.23 (d, J=2.7 Hz, 3H), 7.22 (d, J=2.1 Hz, 1H), 7.20 (t, J=1.4 Hz, 1H), 6.03 (dd, J=6.8, 5.0 Hz, 1H), 5.57-5.52 (m, 1H), 4.78 (t, J=5.3 Hz, 1H), 4.50 (dd, J=11.5, 5.0 Hz, 1H), 4.33 (dd, J=11.5, 6.8 Hz, 1H), 3.84 (ddd, J=11.6, 5.1, 2.2 Hz, 1H), 3.72 (s, 7H), 3.59 (ddd, J=11.6, 8.4, 5.5 Hz, 1H), 3.54-3.47 (m, 1H), 3.12 (ddd, J=8.5, 4.6, 2.2 Hz, 1H), 0.69 (d, J=6.3 Hz, 3H). ¹³C NMR (101 MHz, DMSO-d₆) δ 164.93, 162.94, 158.12, 158.06, 150.58, 145.59, 139.93, 136.40, 136.10, 133.55, 129.74, 129.62, 129.12, 129.01, 128.77, 127.68, 127.64, 126.71, 113.03, 101.88, 85.88, 81.76, 81.60, 68.74, 63.36, 60.42, 54.98, 39.40, 39.18, 38.97, 15.50.

[0733] Synthesis of compound 8: To a solution of compound 7 (1.21 g, 1.81 mmol) in DCM (10 ml) and DIPEA (0.66 ml, 5.4 mmol) was added 2-cyanoethyl N,N-diisopropylchlorophosphoramidite (0.695 ml, 2.2 mmol) at 0° C. The mixture was stirred at 0° C. for 2 h. The reaction mixture was diluted with CH₂Cl₂ (100 mL) then washed with saturated NaHCO₃ aqueous solution (100 mL). The organic layer was separated, dried over anhydrous Na₂SO₄, filtered and concentrated. The amidite 8 was precipitated out from hexane (1.33 g, 1.5 mmol, 85%). ³¹P NMR (202 MHz, CD₃CN) δ 148.81, 148.58.

[0734] Synthesis of compound 9: Standard succination of compound 7 using succinic anhydride and DMAP in CH₂Cl₂ followed by CPG loading using HBTU and DIPEA in DMF gives compound 9.

### Synthesis of 5′-(R)-Methyl-U-UNA Building Blocks

[chemical structure]

[0735] Synthesis of Compound 11: To a solution of compound 3 (2.36 g, 4.85 mmol) in anhydrous THF (48.5 mL), p-nitrobenzoic acid (4.05 g, 24.25 mmol, 5.0 eq), triphenylphosphine (6.36 g, 24.25 mmol, 5.0 eq) and DIAD (4.69 mL, 24.25 mmol, 5.0 eq) were added at 0° C. The reaction was allowed to stir at ambient temperature overnight. The solvent was removed under reduced pressure. The crude material was purified by flash column chromatography (0-25% EtOAc in hexanes) to obtain compound 10 as yellow-white foam (2.86 g, 4.50 mmol, R_{f}=0.37 developed in 33% EtOAc in hexanes). This material was resuspended in 7N ammonia in methanol solution (100 mL) and stirred at room temperature overnight. The solvent was removed and the crude material was purified by flash column chromatography (0-30% EtOAc in hexanes) to yield compound 11 as a white foam (1.47 g, 3.01 mmol, 62%, 2step; R_{f}=0.27, developed with 33% EtOAc in hexanes). ¹H NMR (400 MHz, DMSO-d₆) δ 11.37 (s, 1H), 7.85 (d, J=8.1 Hz, 1H), 5.89 (d, J=7.8 Hz, 1H), 5.71 (d, J=8.0 Hz, 1H), 5.19 (d, J=4.9 Hz, 1H), 4.30 (dd, J=7.8, 4.5 Hz, 1H), 4.21 (d, J=4.4 Hz, 1H), 3.82-3.73 (m, 1H), 3.62 (d, J=4.7 Hz, 1H), 1.11 (d, J=6.5 Hz, 3H), 0.89 (s, 9H), 0.81 (s, 9H), 0.10 (d, J=2.9 Hz, 6H), 0.00 (s, 3H), −0.09 (s, 3H). ¹³C NMR (101 MHz, DMSO-d₆) δ 162.78, 150.87, 140.66, 102.41, 90.00, 85.75, 73.90, 71.64, 66.39, 39.18, 25.69, 25.56, 20.08, 17.71, 17.57, −4.57, −4.63, −4.70, −5.22.

[0736] Synthesis of Compound 12: To a solution of compound 11 (1.40 g, 2.88 mmol) in anhydrous THF (11.5 mL) and anhydrous pyridine (2.2 mL), DMTrCl (2.92 g, 8.63 mmol, 3 eq) and AgNO₃ (0.97 g, 5.75 mmol, 2 eq) were added, and the mixture was stirred overnight at ambient temperature. The mixture was filtered over celite, and the filter cake was washed with DCM. The filtrate was concentrated under reduced pressure, and the residue was extracted with DCM and saturated aq. NaHCO₃. The organic layer was washed with brine, dried and filtered over anhydrous Na₂SO₄, and concentrated. The crude residue was purified by flash column chromatography (0-25% EtOAc in hexanes, 2% triethylamine) to obtain compound 12 as bright yellow foam (2.03 g, 2.57 mmol, 89%, R_{f}=0.27; developed with 33% EtOAc in hexanes). ¹H NMR (400 MHz, DMSO-d₆) δ 11.38 (s, 1H), 7.46-7.38 (m, 2H), 7.30 (td, J=8.1, 7.7, 5.7 Hz, 7H), 7.26-7.17 (m, 1H), 6.94-6.84 (m, 4H), 5.66 (d, J=5.8 Hz, 1H), 5.31 (d, J=8.0 Hz, 1H), 4.11 (dd, J=4.6, 3.2 Hz, 1H), 4.06-4.02 (m, 1H), 3.86 (dd, J=4.6, 3.2 Hz, 1H), 3.74 (s, 6H), 3.49-3.41 (m, 1H), 0.85 (s, 9H), 0.82 (s, 8H), 0.79 (d, J=6.2 Hz, 3H), 0.06 (d, J=3.2 Hz, 5H), 0.01 (s, 3H), −0.08 (s, 3H). ¹³C NMR (101 MHz, DMSO-d₆) δ 158.13, 158.09, 150.42, 141.13, 135.84, 130.07, 130.03, 127.75, 127.65, 126.66, 113.09, 113.04, 101.86, 88.28, 87.24, 86.16, 73.32, 71.44, 69.53, 55.00, 25.64, 25.54, 17.62, 17.54, 17.09, −4.45, −4.64, −4.86, −5.07.

[0737] Synthesis of Compound 13: To a solution of compound 12 (2.03 g, 2.57 mmol) in THF (12.9 mL), TBAF (5.14 g, 5.14 mmol, 2 eq) was added. After stirring at room temperature overnight, the solvent was removed under reduced pressure. The crude reside was pre-absorbed to silica gel (pretreated with 2% triethylamine) then purified via flash column chromatography (0-100% EtOAc in hexane then 2.5% MeOH in EtOAC, 2% triethylamine) to obtain compound 13 as a white foam (1.00 g, 1.78 mmol, 69%; R_{f}=0.45, developed with 5% MeOH in EtOAc). ¹H NMR (400 MHz, DMSO-d₆) δ 11.35 (d, J=2.1 Hz, 1H), 7.47-7.40 (m, 2H), 7.31 (ddd, J=10.1, 7.7, 3.8 Hz, 7H), 7.25-7.18 (m, 1H), 6.95-6.84 (m, 4H), 5.68 (d, J=5.9 Hz, 1H), 5.37 (d, J=5.8 Hz, 1H), 5.18 (dd, J=8.1, 2.0 Hz, 1H), 5.09 (d, J=5.5 Hz, 1H), 4.18 (q, J=5.3 Hz, 1H), 3.97 (q, J=5.9 Hz, 1H), 3.74 (s, 6H), 3.68 (dd, J=4.3, 3.1 Hz, 1H), 3.48-3.39 (m, 1H), 0.76 (d, J=6.4 Hz, 3H). ¹³C NMR (101 MHz, DMSO-d₆) δ 162.83, 158.10, 158.08, 150.61, 146.33, 140.77, 136.26, 136.16, 130.13, 130.09, 127.84, 127.69, 126.58, 113.10, 113.06, 101.65, 87.36, 86.92, 85.98, 72.53, 69.67, 68.96, 55.05, 55.03, 17.08.

[0738] Synthesis of Compound 14: To a solution of compound 13 (1.00 g, 1.78 mmol) in Dioxane (24 mL) and H₂O (3 mL), NaIO₄ (0.42 g, 1.96 mmol, 1.1 eq) dissolved in H₂O (3 mL) was added. The bi-layer reaction mixture was vigorously stirred at ambient temperature for 4 hours. The reaction mixture was filtered and the filter cake was washed with additional dioxane. To the filtrates was added NaBH₄ (0.074 g, 1.96 mmol, 1.1 eq). After stirring at ambient temperature for 2 hours, the mixture was cooled to 0° C. then quenched with 1:1 v/v AcOH:pyridine buffer. After the solvent was removed under reduced pressure, the crude residue was extracted with EtOAc and saturated aq. NaHCO₃. The organic layer was separated, dried over anhydrous Na₂SO₄, filtered, and concentrated under reduced pressure. The crude material was purified by flash column chromatography (0-5% MeOH in DCM, 2% triethylamine), to obtain compound 14 as a white foam (250 mg, 0.44 mmol, 25%; R_{f}=0.28 developed with 5% MeOH in DCM). ¹H NMR (400 MHz, DMSO-d₆) δ 11.22 (d, J=2.3 Hz, 1H), 7.65 (d, J=8.1 Hz, 1H), 7.37-7.30 (m, 2H), 7.29-7.14 (m, 8H), 6.90-6.77 (m, 4H), 5.65 (t, J=5.8 Hz, 1H), 5.53 (dd, J=8.0, 2.2 Hz, 1H), 5.10 (t, J=5.9 Hz, 1H), 4.64 (t, J=5.3 Hz, 1H), 3.73 (s, 7H), 3.63-3.43 (m, 3H), 3.30-3.14 (m, 2H), 3.04-2.95 (m, 1H), 1.23 (t, J=7.3 Hz, 1H), 0.77 (d, J=6.3 Hz, 3H). ¹³C NMR (101 MHz, DMSO-d₆) δ 163.30, 157.97, 151.06, 145.81, 141.30, 136.45, 136.36, 129.91, 129.86, 127.90, 127.55, 126.48, 112.98, 112.96, 101.48, 85.79, 84.25, 83.07, 69.00, 61.65, 61.03, 54.98, 15.80, 1.12.

[0739] Synthesis of Compound 15: To a solution of compound 14 (4.63 g, 7.75 mmol) in anhydrous DCM (215 mL) and pyridine (1.5 mL), cooled to −78° C., benzoyl chloride (1.0 mL, 8.53 mmol) was added dropwise. After stirring at −78° C. for 1 hour, reaction mixture was brought to 0° C., and quenched with EtOH (5 mL). The mixture was extracted with DCM and saturated aq. NaHCO₃. The organic layer was washed with brine, separated, dried over anhydrous Na₂SO₄, filtered, and concentrated. The crude residue was purified by flash column chromatography (0-75% EtOAC in hexanes) to yield compound 15 as a white foam (2.30 g, 3.45 mmol, 45%; R_{f}=0.54, developed in 50% EtOAc in hexanes). ¹H NMR (400 MHz, DMSO-d₆) δ 11.32 (d, J=2.2 Hz, 1H), 7.88 (dd, J=8.4, 1.4 Hz, 2H), 7.79 (d, J=8.0 Hz, 1H), 7.70-7.63 (m, 1H), 7.53 (t, J=7.8 Hz, 2H), 7.37-7.31 (m, 2H), 7.29-7.15 (m, 7H), 6.87-6.78 (m, 4H), 6.03 (dd, J=6.7, 5.0 Hz, 1H), 5.53 (dd, J=8.0, 2.1 Hz, 1H), 4.73 (t, J=5.1 Hz, 1H), 4.55 (dd, J=11.4, 5.0 Hz, 1H), 4.40 (dd, J=11.4, 6.8 Hz, 1H), 3.73 (s, 6H), 3.57 (qd, J=6.4, 1.8 Hz, 1H), 3.35-3.25 (m, 2H), 3.20 (dt, J=11.4, 5.0 Hz, 1H), 2.97-2.91 (m, 1H), 0.85 (d, J=6.3 Hz, 3H). ¹³C NMR (101 MHz, DMSO-d₆) δ 164.96, 163.08, 158.02, 150.86, 145.75, 140.73, 136.37, 136.24, 133.60, 129.92, 129.85, 129.10, 129.05, 128.83, 127.88, 127.59, 126.54, 113.04, 113.00, 102.08, 85.92, 83.05, 81.25, 68.92, 63.63, 61.13, 55.00, 39.99, 15.74.

[0740] Synthesis of Compound 16: To a solution of compound 15 (2.30 g, 3.45 mmol) in DCM (30 ml) and DIPEA (2.30 ml, 18.9 mmol) was added 2-cyanoethyl N,N-diisopropylchlorophosphoramidite (2.41 ml, 7.57 mmol) at 0° C. The mixture was stirred at 0° C. for 2 h. The reaction mixture was diluted with CH₂Cl₂ (100 mL) then washed with saturated NaHCO₃ aqueous solution (100 mL). The organic layer was separated, dried over anhydrous Na₂SO₄, filtered and concentrated. The crude material was purified by flash column chromatography (0-33% ethyl acetate in hexane) to give phosphoramidite 16 (2.31 g, 2.66 mmol, 77%, R_{f}=0.41; developed with 50% ethyl acetate in hexanes). ³¹P NMR (202 MHz, CD₃CN) δ 148.78, 148.74.

[0741] Synthesis of compound 17: Standard succination of compound 15 using succinic anhydride and DMAP in CH₂Cl₂ followed by CPG loading using HBTU and DIPEA in DMF gives compound 17.

Synthesis of 4′-C-(β)-methoxy-U-UNA building blocks

[chemical structure]

[0742] Synthesis of compound 21 and 22: mCPBA (19.9 g, 116 mmol) was added to a cooled solution of compound 1 (25.0 g, 55.9 mmol) in methanol (275 ml) and the mixture was stirred overnight at room temperature. About 100 ml each of 10% aqueous Na₂S₂O₃ (aq) and saturated aqueous NaHCO₃ was added to the solution and stirred for 15 minutes. The reaction mixture was then extracted with DCM (3× with 150 ml). The organic layers were combined, dried over sodium sulfate, filtered and concentrated. The crude material was purified by flash column chromatography (1.7% MeOH in DCM) to give compound 22 (8.8 g, 17.5 mmol, 31%, R_{f}=0.42; developed with 5% MeOH in DCM) and 21 (1.0 g, 1.9 mmol, 3.6%, R_{f}=0.48; developed with 5% MeOH in DCM). Compound 22: ¹H NMR (400 MHz, DMSO-d₆) δ 11.44 (d, J=2.1 Hz, 1H), 7.42 (d, J=8.2 Hz, 1H), 6.01 (d, J=7.4 Hz, 1H), 5.81 (dd, J=8.1, 2.0 Hz, 1H), 4.74 (t, J=4.9 Hz, 1H), 4.56 (dd, J=7.4, 3.7 Hz, 1H), 4.00 (d, J=3.6 Hz, 1H), 3.55 (t, J=4.3 Hz, 2H), 3.31 (s, 1H), 3.29 (s, 3H), 0.86 (d, J=40.3 Hz, 18H), 0.12 (d, J=8.3 Hz, 6H), −0.01 (s, 3H), −0.09 (s 3H). ¹³C NMR (126 MHz, DMSO-d₆) δ 162.60, 150.98, 140.16, 109.53, 103.49, 86.14, 75.18, 74.91, 55.45, 48.85, 25.82, 25.77, 17.99, 17.77, −4.33, −4.39, −4.97, −5.10. Compound 21: ¹H NMR (400 MHz, DMSO-d₆) δ 11.41 (d, J=2.2 Hz, 1H), 7.76 (d, J=8.1 Hz, 1H), 5.99 (d, J=7.2 Hz, 1H), 5.73 (dd, J=8.4, 2.4 Hz, 1H), 5.34 (t, J=5.6 Hz, 1H), 4.32 (dd, J=7.2, 5.2 Hz, 1H), 4.22 (d, J=5.2 Hz, 1H), 3.54-3.41 (m, 2H), 3.30 (s, 3H), 0.90 (s, 9H), 0.80 (s, 9H), 0.07 (d, J=6.2 Hz, 6H), −0.01 (s, 3H), −0.10 (s, 3H). ¹³C NMR (126 MHz, DMSO-d₆) δ 162.60, 150.98, 140.16, 109.53, 103.49, 86.14, 75.18, 74.91, 55.45, 48.85, 25.82, 25.77, 17.99, 17.77, −4.33, −4.39, −4.97, −5.10.

[0743] Synthesis of compound 23: To a solution of compound 22 (8.8 g, 17.5 mmol) in anhydrous pyridine (60 ml) was added DMTrCl (8.89 g, 26.3 mmol) and the mixture was stirred at room temperature overnight. After removing the solvent, the residue was extracted with DCM and saturated aq. NaHCO₃. The organic layer was dried over sodium sulfate, filtered and concentrated. The crude material was purified by flash column chromatography to give compound 23 (14.1 g, 17.9 mmol, 99%, R_{f}=0.77; developed in 50% EtOAC in Hexanes). ¹H NMR (400 MHz, DMSO-d₆) δ 11.46 (s, 1H), 7.61 (d, J=8.1 Hz, 1H), 7.46-7.37 (m, 2H), 7.33-7.23 (m, 6H), 7.22-7.15 (m, 1H), 6.86 (dd, J=9.0, 3.1 Hz, 4H), 6.01 (d, J=4.9 Hz, 1H), 5.80 (d, J=8.1 Hz, 1H), 4.43 (t, J=4.7 Hz, 1H), 4.03 (d, J=4.4 Hz, 1H), 3.71 (s, 6H), 3.65 (d, J=10.7 Hz, 1H), 3.45 (s, 3H), 2.88 (d, J=10.7 Hz, 1H), 0.71 (s, 8H), 0.63 (s, 8H), −0.03 (s, 3H), −0.04 (d, J=3.6 Hz, 6H), −0.19 (s, 3H). ¹³C NMR (126 MHz, DMSO-d₆) δ 158.07, 150.80, 144.86, 140.29, 135.71, 129.59, 129.57, 127.77, 127.55, 126.57, 113.20, 113.12, 108.03, 102.81, 88.51, 75.64, 74.36, 64.56, 54.97, 52.32, 25.63, 25.50, 17.51, 17.44, −4.33, −4.81, −4.86, −5.18.

[0744] Synthesis of compound 24: To a solution of compound 23 (12.1 g, 15.0 mmol) in THF (100 ml) was added 30 ml (30 mmol) of 1 M TBAF in THF. The reaction was stirred overnight under argon atmosphere and the next day the solvent was evaporated under vacuum. The crude material was purified with column chromatography in 2% MeOH in EtOAc to yield compound 24 (8.31 g, 14.4 mmol, 96%, R_{f}=0.48; developed with 10% MeOH in DCM). ¹H NMR (400 MHz, DMSO-d₆) δ 11.35 (s, 1H), 7.48-7.42 (m, 2H), 7.39 (d, J=8.2 Hz, 1H), 7.34-7.17 (m, 8H), 6.87 (d, J=8.9 Hz, 3H), 5.98 (d, J=7.4 Hz, 1H), 5.71 (d, J=5.1 Hz, 2H), 5.52 (d, J=6.7 Hz, 1H), 4.44 (td, J=7.2, 4.2 Hz, 1H), 4.05 (t, J=4.4 Hz, 1H), 3.72 (d, J=1.3 Hz, 7H), 3.44 (d, J=9.8 Hz, 1H), 3.31 (s, 3H), 2.83 (s, 4H), 2.80 (d, J=3.5 Hz, 1H), 1.98 (s, 1H).

[0745] Synthesis of compound 25: Compound 24 (7.28 g, 12.6 mmol) was dissolved in dioxane (85 ml) and water (15 ml). NaIO₄ (3.24 g, 15.2 mmol) was added slowly to this solution while stirring at room temperature. The reaction mixture was stirred at room temperature overnight then filtered and the precipitate was washed using 100 ml of additional dioxane. To the filtrate, NaBH₄ (0.500 g, 19.0 mmol) was added and the reaction mixture was again stirred at room temperature for 3 hours. The reaction was quenched with 20 ml of 1:1 mixture of pyridine and acetic acid. After removing the solvents, the residue was extracted with DCM and saturated aq. NaHCO₃. The organic layer was dried over sodium sulfate, filtered and concentrated. The crude material was purified by flash column chromatography (0-3% MeOH in DCM) to give compound 25 (5.40 g, 9.33 mol, 74%, R_{f}=0.26; developed with 5% MeOH in DCM). ¹H NMR (400 MHz, DMSO-d₆) δ 11.12 (s, 1H), 7.47 (d, J=8.0 Hz, 1H), 7.42-7.12 (m, 9H), 6.95-6.82 (m, 4H), 5.84 (t, J=5.8 Hz, 1H), 5.50 (d, J=8.0 Hz, 1H), 5.08 (s, 1H), 4.85 (t, J=3.9 Hz, 1H), 3.73 (s, 6H), 3.44 (dd, J=7.1, 3.9 Hz, 3H), 3.26 (d, J=9.7 Hz, 1H), 2.90 (s, 3H), 2.87 (d, J=9.6 Hz, 1H). ¹³C NMR (126 MHz, DMSO-d₆) δ 163.40, 158.04, 150.41, 144.66, 141.80, 135.46, 135.09, 129.75, 129.70, 127.78, 127.66, 126.64, 113.15, 113.11, 102.82, 100.91, 75.32, 61.95, 59.63, 58.85, 54.99, 48.13, 45.55, 10.23.

[0746] Synthesis of compound 26: To a solution of compound 25 (4.7 g, 8.12 mmol) in DCM (175 ml) and pyridine (7 mL) at −78° C. was added a solution of BzCl (1.04 ml, 8.9 mmol) in DCM (50 mL) over a period of 30 min. The reaction mixture was then stirred for 1 hour at −78° C. and then allowed to room temperature, at which point 5 ml of ethanol was added to quench the reaction. The mixture was washed with 250 ml of NaHCO₃ and extracted 3 times with 100 ml of DCM. The organic layers were combined, dried over sodium sulfate and concentrated. Purification by column chromatography (0-3% MeOH in DCM) yielded compound 26 (2.73 g, 4.0 mmol, 49%, R_{f}=0.30; developed with 5% MeOH in DCM). ¹H NMR (400 MHz, DMSO-d₆) δ 11.24 (s, 1H), 7.85-7.77 (m, 2H), 7.68 (d, J=8.1 Hz, 1H), 7.66-7.62 (m, 1H), 7.49 (t, J=7.8 Hz, 2H), 7.43-7.37 (m, 2H), 7.33-7.14 (m, 7H), 6.86 (d, J=8.9 Hz, 3H), 6.22 (t, J=6.2 Hz, 1H), 5.59 (d, J=8.1 Hz, 1H), 4.99 (t, J=4.2 Hz, 1H), 4.38 (d, J=6.1 Hz, 2H), 3.73 (dd, J=11.5, 4.1 Hz, 1H), 3.70 (s, 6H), 3.47 (dd, J=11.5, 4.1 Hz, 1H), 3.26 (d, J=9.9 Hz, 1H), 2.98 (d, J=10.2 Hz, 1H), 2.96 (s, 3H). ¹³C NMR (126 MHz, DMSO-d₆) δ 164.86, 163.13, 158.07, 150.30, 144.52, 141.08, 135.23, 135.01, 133.62, 129.72, 129.70, 129.07, 128.89, 128.79, 127.81, 127.63, 126.68, 113.16, 113.13, 103.38, 101.72, 85.40, 72.77, 63.73, 59.64, 59.36, 54.96, 48.56.

[0747] Synthesis of compound 27: To a solution of compound 26 (2.58 g, 3.77 mmol) in DCM (20 ml) was added DIPEA (1.38 ml, 11.31 mmol) and 2-cyanoethyl N,N-diisopropylchlorophosphoramidite (1.32 ml, 4.15 mmol) at 0° C. The reaction mixture was allowed to room temperature and stirred for 3 h. The reaction mixture was diluted with CH₂Cl₂ (100 mL) then washed with saturated NaHCO₃ aqueous solution (100 mL). The organic layer was separated, dried over anhydrous Na₂SO₄, filtered and concentrated. Pure compound 27 (3.89 g, 4.4 mmol, quant) was obtained by precipitating the crude mixture, dissolved in minimal DCM in 1 L of hexane. Solids were collected by dissolving in DCM and then concentrated to white foam. ³¹P NMR (202 MHz, CD₃CN) δ 148.70, 148.68.

[0748] Synthesis of compound 28: Compound 27 (2.43 g, 3.56 mmol) was treated with 80% AcOH (80 mL). After removing the solvent, the residue was purified by flash column chromatography (1.1 g, 2.89 mmol, 81%).

[0749] Synthesis of compound 29: Compound 29 is synthesized using standard conditions with DMTrCl and pyridine, as described for compound 23.

[0750] Synthesis of compound 30: Compound 30 is synthesized using standard conditions for phosphitylation, as described for compound 27.

### Synthesis of 2′-Methyl-U-UNA Building Blocks

[chemical structure]

[0751] Synthesis of compound 52: To a solution of compound 51 (500 mg, 0.893 mmol) in DCM (10 mL) was added NaIO₄ (287 mg, 1.34 mmol) in H₂O (10 mL). The resulting mixture was vigorously stirred for 4 h, the reaction completion was checked by TLC. The organic layer was separated and evaporated in vacuo. The resulting keto-aldehyde colorless foam was used for next step without further purification. A round-bottom flask was charged with η6-(p-cymene)-(S,S)—N-toluenesulfonyl-1,2-diphenylethylenediamine(1-)ruthenium(II) chloride (15 mg, 0.024 mmol, 2.5 mol %) and the keto-aldehyde (500 mg, 0.893 mmol), and the system was flushed with Ar 3 times. A solution of sodium formate (2.27 g, 33.3 mmol) in water (13 mL) was added, followed by ethyl acetate (3 mL). The resulting two-phase mixture was vigorously stirred for 24 h at room temperature. The organic phase was separated, and the aqueous phase was extracted with another 10 mL of ethyl acetate. The solvent was removed from the combined organic layers at reduced pressure on a rotary evaporator. The crude residue was purified by flash column chromatography on silica gel to afford compound 52 as a colorless foam (401 mg, 80% over 2 steps). ¹H NMR (400 MHz, DMSO-d₆): δ 11.34 (s, 1H), 7.60 (d, J=8.0 Hz, 1H), 7.37-7.08 (m, 9H), 6.85 (d, J=8.4 Hz, 4H), 5.48 (dd, J=15.5, 6.5 Hz, 2H), 5.08 (d, J=5.3 Hz, 1H), 4.72 (s, 1H), 3.72 (s, 7H), 3.55 (s, 3H), 3.10 (s, 2H), 1.03 (d, J=6.4 Hz, 3H). ¹³C NMR (126 MHz, DMSO-d₆) δ 163.21, 157.99, 151.08, 144.81, 141.57, 135.61, 135.51, 129.61, 129.57, 127.75, 127.63, 126.59, 113.12, 113.09, 101.20, 86.46, 85.50, 79.54, 67.11, 63.64, 60.44, 59.75, 54.99, 39.23, 18.38, 14.09. HRMS; [M+Na]⁺ calc. for C₃₁H₃₄N₂O₈Na, 585.2213; found: 585.2224.

[0752] Synthesis of compound 53: To a solution of compound 52 (520 mg, 0.925 mmol) in dry pyridine (10 mL) was added TBSCl (154 mg, 1.02 mmol) and DMAP (11 mg, 0.09 mmol). The reaction mixture was stirred for 3 h at room temperature and then the resulting mixture was diluted with DCM. The reaction was quenched with saturated aq.NaHCO₃. The organic layer was separated, washed with brine and concentrated in vacuo. The crude residue was purified by flash column chromatography on silica gel to afford compound 53 as a colorless foam (400 mg, 64%). ¹H NMR (400 MHz, DMSO-d₆) δ 11.34 (d, J=2.0 Hz, 1H), 7.62 (d, J=8.0 Hz, 1H), 7.45-7.06 (m, 9H), 7.00-6.69 (m, 4H), 5.62-5.31 (m, 2H), 4.98 (d, J=5.9 Hz, 1H), 3.73 (ddd, J=41.8, 11.1, 5.2 Hz, 8H), 3.60-3.38 (m, 2H), 3.05 (d, J=5.1 Hz, 2H), 1.05 (d, J=6.3 Hz, 3H), 0.74 (s, 9H), −0.07 (d, J=6.9 Hz, 6H). ¹³C NMR (126 MHz, DMSO-d6) δ 163.21, 158.01, 151.07, 144.76, 141.61, 135.59, 135.41, 129.56, 129.54, 127.71, 127.57, 126.57, 113.09, 113.06, 101.02, 85.92, 85.61, 78.31, 66.87, 63.36, 61.41, 54.96, 25.58, 18.56, 17.70, −5.65, −5.69. HRMS; [M+Na]⁺ calc. for C₃₇H₄₈N₂O₈SiNa, 699.3078; found: 699.3067.

[0753] Synthesis of compound 54: To a solution of compound 53 (6.6 g, 9.76 mmol) in dry DCM (100 mL) were added Et₃N (13.5 mL, 97.6 mmol) and BzCl (5.6 mL, 48.8 mmol). The reaction mixture was stirred for 4 h at room temperature and then the resulting mixture was diluted with DCM. The reaction was quenched with saturated aq. NaHCO₃. The organic layer was separated, washed with brine and concentrated in vacuo. The crude residue was purified by flash column chromatography on silica gel to afford compound 54 as a colorless foam (7.8 g, 90%). ¹H NMR (400 MHz, DMSO-d₆) δ 8.07-7.11 (m, 20H), 6.98-6.69 (m, 4H), 6.02 (d, J=4.6 Hz, 1H), 5.69-5.27 (m, 2H), 3.81-3.42 (m, 9H), 3.17 (qd, J=10.7, 4.4 Hz, 2H), 1.37 (d, J=6.5 Hz, 3H), 0.71 (s, 9H), −0.10 (d, J=12.1 Hz, 6H). ¹³C NMR (126 MHz, DMSO-d6) δ 169.19, 165.01, 161.61, 158.08, 149.35, 144.66, 141.00, 135.57, 135.52, 135.30, 133.60, 130.92, 130.23, 129.62, 129.47, 129.23, 129.18, 128.73, 127.78, 127.63, 126.71, 113.14, 113.11, 101.19, 85.91, 84.66, 78.65, 69.99, 63.23, 61.81, 54.96, 25.54, 17.67, 14.99, −5.76. HRMS; [M+Na]⁺ calc. for C₅₁H₅₆N₂O₁₀SiNa, 907.3602; found: 907.3611.

[0754] Synthesis of compound 55: To a solution of compound 54 (7.3 g, 8.25 mmol) in dry THF (83 mL) was added Et₃N·3HF (13.4 mL, 82.5 mmol) dropwisely. The reaction mixture was stirred for 8 h at room temperature then diluted with AcOEt and quenched with saturated aq. NaHCO₃. The organic layer was separated, washed with brine and concentrated in vacuo. The crude residue was purified by flash column chromatography on silica gel to afford compound 55 as a colorless foam (6.1 g, 96%). ¹H NMR (400 MHz, DMSO-d₆) δ 8.05-7.11 (m, 20H), 7.04-6.67 (m, 4H), 6.04 (d, J=3.9 Hz, 1H), 5.67-5.25 (m, 2H), 4.85 (t, J=5.1 Hz, 1H), 3.72-3.70 (m, 7H), 3.60-3.38 (m, 2H), 3.18 (qd, J=10.7, 5.1 Hz, 2H), 1.39 (d, J=6.5 Hz, 3H). ¹³C NMR (126 MHz, DMSO-d₆) δ 169.19, 165.10, 161.60, 158.05, 149.26, 144.64, 141.00, 135.56, 135.50, 135.37, 133.56, 130.95, 130.19, 129.65, 129.47, 129.21, 129.17, 128.73, 127.78, 127.70, 126.72, 113.14, 113.12, 100.84, 85.83, 84.54, 79.12, 70.06, 63.63, 60.48, 54.97, 14.94. HRMS; [M+Na]⁺ calc. for C₄₅H₄₂N₂O₁₀Na, 793.2737; found: 793.2724.

[0755] Synthesis of compound 56: To a solution of compound 55 (568 mg, 0.737 mmol) in dry DCM 8 mL were added DIPEA (385 μL, 2.21 mmol) and 2-cyanoethylchloro-N,N-diisopropylphosphoramidite (181 μL, 0.811 mmol) dropwisely. The reaction mixture was stirred for 1 h at room temperature, then diluted with DCM and quenched the reaction with saturated aq. NaHCO₃. The organic layer was separated, washed with brine and concentrated in vacuo. The crude residue was purified by flash column chromatography on silica gel to afford compound 56 as a colorless foam (623 mg, 87%). ¹H NMR (500 MHz, Acetonitrile-d₃) δ 8.09-7.89 (m, 4H), 7.86-7.13 (m, 16H), 6.95-6.74 (m, 4H), 6.01 (dd, J=8.7, 3.7 Hz, 1H), 5.45 (dtt, J=21.1, 8.2, 4.1 Hz, 2H), 3.90-3.60 (m, 11H), 3.51 (ddq, J=13.5, 10.3, 6.7 Hz, 2H), 3.44-3.10 (m, 2H), 2.54 (dt, J=8.8, 5.9 Hz, 2H), 1.44 (t, J=6.2 Hz, 3H), 1.32-0.93 (m, 12H). ¹³C NMR (101 MHz, Acetonitrile-d₃) δ 169.12, 165.27, 161.69, 158.37, 149.44, 144.58, 140.43, 135.10, 133.09, 131.14, 129.94, 129.69, 129.67, 129.39, 129.11, 128.33, 127.69, 127.54, 126.57, 118.12, 116.96, 112.76, 112.75, 100.82, 84.61, 69.86, 54.58, 42.58, 42.46, 23.67, 23.62, 23.55, 23.48, 19.68, 19.62. ³¹P NMR (202 MHz, Acetonitrile-d₃) δ 149.67; 149.29. HRMS; [M+H]⁺ calc. for C₅₄H₆₀N₄O₁₁P, 971.3996; found: 971.3989.

[0756] Synthesis of compound 57: Standard succination of compound 55 using succinic anhydride and DMAP in CH₂Cl₂ followed by CPG loading using HBTU and DIPEA in DMF gives compound 57.

### Synthesis of 2′-(R)-Methyl-U-UNA Building Blocks

[chemical structure]

[0757] Synthesis of compound 58: To a solution of compound 53 (2.2 g, 3.25 mmol) in dry THF 100 mL were added PPh₃ (4.26 g, 16.3 mmol), BzOH (1.98 g, 16.3 mmol) and DIAD (3.15 mL, 16.3 mmol) dropwisely. The reaction mixture was stirred for 3 h at room temperature, the reaction completion was checked by TLC. The solvent was removed in vacuo. The crude residue was purified by flash column chromatography on silica gel to afford a mixture of 2,2′-anhydro-nucleoside and DIAD byproducts. This mixture was dissolved in THF (50 mL). To the solution of mixture was added 1N aq. NaOH (10 mL) dropwisely. Resulting mixture was stirred for 3 h. The solvent was removed in vacuo. The crude residue was purified by flash column chromatography on silica gel to afford compound 58 as a colorless foam (1.8 g, 80%). ¹H NMR (400 MHz, DMSO-d₆) δ 11.30 (d, J=2.1 Hz, 1H), 7.62 (d, J=8.1 Hz, 1H), 7.43-7.04 (m, 9H), 6.96-6.65 (m, 4H), 5.60-5.40 (m, 2H), 5.07 (d, J=5.4 Hz, 1H), 3.96-3.44 (m, 10H), 3.11-2.77 (m, 2H), 1.14 (d, J=6.2 Hz, 3H), 0.75 (s, 9H), −0.05 (s, 6H). ¹³C NMR (126 MHz, DMSO-d₆) δ 163.22, 158.00, 157.99, 151.78, 144.75, 141.42, 135.58, 135.38, 129.51, 129.46, 127.70, 127.53, 126.56, 113.10, 113.06, 101.70, 86.25, 85.44, 77.71, 66.11, 63.07, 61.51, 54.96, 25.59, 19.72, 17.73, −5.66, −5.68. HRMS; [M+Na]⁺ calc. for C₃₇H₄₈N₂O₈SiNa, 699.3078; found: 699.3099.

[0758] Synthesis of compound 59: To a solution of compound 58 (3.3 g, 4.88 mmol) in dry DCM (50 mL) were added Et₃N (6.8 mL, 48.8 mmol) and BzCl (2.8 mL, 24.4 mmol). The reaction mixture was stirred for 4 h at room temperature and then the resulting mixture was diluted with DCM. The reaction was quenched with saturated aq. NaHCO₃. The organic layer was separated, washed with brine and concentrated in vacuo. The crude residue was purified by flash column chromatography on silica gel to afford compound 59 as a colorless foam (4.0 g, 92%). ¹H NMR (400 MHz, DMSO-d₆) δ 8.11-7.76 (m, 3H), 7.76-7.56 (m, 4H), 7.48 (t, J=7.7 Hz, 2H), 7.39-7.02 (m, 11H), 7.08-6.69 (m, 4H), 6.03 (d, J=7.1 Hz, 1H), 5.83 (d, J=8.2 Hz, 1H), 5.40 (p, J=6.4 Hz, 1H), 3.70 (s, 9H), 3.19-2.93 (m, 2H), 1.41 (d, J=6. Hz, 3H), 0.75 (s, 9H), −0.06 (d, J=1.4 Hz, 6H). ¹³C NMR (101 MHz, DMSO-d₆) δ 164.48, 161.58, 158.07, 158.05, 149.77, 141.63, 135.50, 135.42, 135.31, 133.72, 130.77, 129.81, 129.61, 129.55, 129.34, 129.21, 128.99, 128.87, 127.77, 127.58, 126.66, 113.16, 113.12, 102.04, 85.74, 78.75, 70.38, 62.97, 61.91, 54.96, 39.97, 25.59, 17.71, 16.19, −5.67, −5.71. HRMS; [M+Na]⁺ calc. for C₅₁H₅₆N₂O₁₀SiNa, 907.3602; found: 907.3616.

[0759] Synthesis of compound 60: To a solution of compound 60 (3.8 g, 4.30 mmol) in dry THF (43 mL) was added Et₃N·3HF (6.98 mL, 43.0 mmol) dropwisely. The reaction mixture was stirred for 8 h at room temperature and then the resulting mixture was diluted with DCM. The reaction was quenched with saturated aq.NaHCO₃. The organic layer was separated, washed with brine and concentrated in vacuo. The crude residue was purified by flash column chromatography on silica gel to afford compound 60 as a colorless foam (3.2 g, 97%). ¹H NMR (400 MHz, DMSO-d) δ 7.96 (dd, J=8.2, 1.4 Hz, 1H), 7.90 (dt, J=8.3, 1.4 Hz, 2H), 7.74-7.61 (m, 4H), 7.48 (t, J=7.7 Hz, 2H), 7.40-7.16 (m, 11H), 6.86 (d, J=8.4 Hz, 4H), 6.03 (dd, J=7.1, 2.0 Hz, 1H), 5.84 (d, J=8.1 Hz, 1H), 5.46-5.34 (m, 1H), 4.86 (td, J=5.1, 1.7 Hz, 1H), 3.66-3.62 (m, 7H), 3.52 (s, 2H), 3.21-3.01 (m, 2H), 1.48-1.37 (m, 3H). ¹³C NMR (101 MHz, DMSO-d₆) δ 169.14, 164.53, 161.60, 158.03, 158.01, 149.76, 144.74, 141.66, 135.50, 135.43, 133.70, 130.82, 129.80, 129.65, 129.57, 129.35, 129.22, 129.02, 128.87, 127.78, 127.64, 126.65, 113.15, 113.13, 101.94, 85.62, 84.94, 79.38, 70.53, 63.44, 60.51, 54.96, 16.33, 14.07. HRMS; [M+Na]⁺ calc. for C₄₅H₄₂N₂O₁₀Na, 793.2737; found: 793.2742.

[0760] Synthesis of compound 61: To a solution of compound 60 (543 mg, 0.705 mmol) in dry DCM (7 mL) were added DIPEA (368 μL, 2.12 mmol) and 2-cyanoethylchloro-N,N-diisopropylphosphoramidite (173 μL, 0.776 mmol) dropwisely. The reaction mixture was stirred for 1 h at room temperature and then the resulting mixture was diluted with DCM. The reaction was quenched with saturated aq. NaHCO₃. The organic layer was separated, washed with brine and concentrated in vacuo. The crude residue was purified by flash column chromatography on silica gel to afford compound 61 as a colorless foam (549 mg, 80%). ¹H NMR (500 MHz, Acetonitrile-d₃) δ 7.95 (ddd, J=8.4, 2.7, 1.4 Hz, 2H), 7.81-7.56 (m, 5H), 7.52-7.35 (m, 4H), 7.35-7.16 (m, 9H), 6.90-6.77 (m, 4H), 6.04 (dd, J=8.7, 6.8 Hz, 1H), 5.39 (dt, J=11.2, 6.5 Hz, 1H), 3.86-3.61 (m, 11H), 3.62-3.40 (m, 2H), 3.33-3.11 (m, 2H), 2.56 (q, J=5.9 Hz, 2H), 1.45 (dd, J=6.4, 3.9 Hz, 3H), 1.30-0.97 (m, 12H). ¹³C NMR (101 MHz, Acetonitrile-d₃) δ 166.05, 163.01, 159.76, 151.29, 146.07, 142.03, 142.00, 136.94, 136.84, 136.31, 134.59, 132.37, 131.05, 131.01, 130.97, 130.67, 130.56, 130.44, 129.82, 129.04, 128.91, 127.92, 119.52, 118.35, 114.16, 114.14, 103.32, 87.38, 86.03, 71.83, 71.78, 64.57, 55.98, 44.01, 43.90, 43.88, 25.11, 25.09, 25.02, 24.99, 24.96, 24.89, 21.10, 21.03, 17.08, 17.04, 2.01, 1.80, 1.67. ³¹P NMR (202 MHz, Acetonitrile-d₃) δ 149.61, 149.29. HRMS; [M+H]⁺ calc. for C₅₄H₆₀N₄O₁₁P, 971.3996; found: 971.3967.

[0761] Synthesis of compound 62: Standard succination of compound 60 using succinic anhydride and DMAP in CH₂Cl₂ followed by CPG loading using HBTU and DIPEA in DMF gives compound 62.

### Synthesis of 2′-Methyl-U-UNA Mosher Esters

[chemical structure]

[0762] Synthesis of compound 63: To a solution of compound 53 (100 mg, 0.148 mmol), DMAP (1.8 mg, 0.02 mmol), Et₃N (103 μL, 0.740 mmol) in dry MeCN (2 mL) was added (S)-(+)-MTPACl (33.2 μL, 0.178 mmol) dropwisely. The reaction mixture was stirred for 5 h at room temperature and then the resulting mixture was diluted with AcOEt. The reaction was quenched with saturated aq. NaHCO₃. The organic layer was separated, washed with brine and concentrated in vacuo. The crude residue was purified by flash column chromatography on silica gel to afford compound 63 as a colorless foam (68 mg, 52%). ¹H NMR (400 MHz, DMSO-d₆) δ 11.44 (s, 1H), 7.60-7.08 (m, 15H), 6.84 (dd, J=8.9, 3.5 Hz, 4H), 5.86 (d, J=5.9 Hz, 1H), 5.48-5.19 (m, 2H), 3.72 (s, 6H), 3.51-3.34 (m, 5H), 2.93 (t, J=4.4 Hz, 3H), 1.31 (d, J=6.4 Hz, 3H), 0.69 (s, 9H), −0.15 (d, J=9.4 Hz, 6H). ¹³C NMR (126 MHz, DMSO-d₆) 165.03, 162.83, 158.02, 150.90, 144.65, 139.94, 135.42, 135.24, 131.20, 129.81, 129.56, 128.41, 127.68, 127.52, 126.85, 126.59, 113.06, 113.03, 102.06, 85.63, 82.96, 77.67, 72.79, 63.22, 61.07, 55.35, 54.95, 39.23, 25.48, 17.59, 15.09, −5.78, −5.84. HRMS; [M+Na]⁺ calc. for C₄₇H₅₅F₃N₂O₁₀SiNa, 915.3476; found: 915.3485.

[0763] Synthesis of compound 64: To a solution of compound 53 (100 mg, 0.148 mmol), DMAP (1.8 mg, 0.02 mmol), Et₃N (103 μL, 0.740 mmol) in dry MeCN (2 mL) was added (R)-(−)-MTPACl (33.2 μL, 0.178 mmol) dropwisely. The reaction mixture was stirred for 5 h at room temperature and then the resulting mixture was diluted with AcOEt. The reaction was quenched with saturated aq. NaHCO₃. The organic layer was separated, washed with brine and concentrated in vacuo. The crude residue was purified by flash column chromatography on silica gel to afford compound 64 as a colorless foam (70 mg, 54%). ¹H NMR (400 MHz, DMSO-d₆) δ 11.48 (s, 1H); 7.65 (d, J=8.1 Hz, 2H), 7.53-7.02 (m, 13H), 6.94-6.65 (m, 4H), 5.88 (d, J=6.0 Hz, 1H), 5.56-5.27 (m, 2H), 3.87-3.44 (m, 9H), 3.31 (s, 3H), 3.04 (t, J=4.0 Hz, 2H), 1.20 (d, J=6.4 Hz, 3H), 0.68 (s, 9H), −0.15 (d, J=7.4 Hz, 6H). ¹³C NMR (126 MHz, DMSO-d₆) δ 158.04, 150.98, 144.67, 135.45, 135.25, 129.94, 129.58, 128.53, 127.71, 127.54, 127.16, 126.61, 113.09, 113.06, 102.30, 77.77, 72.94, 63.27, 61.25, 55.19, 54.97, 39.06, 25.50, 17.62, 14.76, −5.83, −5.86. HRMS; [M+Na]⁺ calc. for C₄₇H₅₅F₃N₂O₁₀SiNa, 915.3476; found: 915.3484.

[0764] Synthesis of compound 65: To a solution of compound 58 (100 mg, 0.148 mmol), DMAP (1.8 mg, 0.02 mmol), Et₃N (103 μL, 0.740 mmol) in dry MeCN (2 mL) was added (S)-(+)-MTPACl (33.2 μL, 0.178 mmol) dropwisely. The reaction mixture was stirred for 5 h at room temperature and then the resulting mixture was diluted with AcOEt. The reaction was quenched with saturated aq. NaHCO₃. The organic layer was separated, washed with brine and concentrated in vacuo. The crude residue was purified by flash column chromatography on silica gel to afford compound 65 as a colorless foam (101 mg, 77%). ¹H NMR (400 MHz, DMSO-d₆) δ 11.47 (d, J=2.0 Hz, 1H), 7.67 (d, J=8.1 Hz, 1H), 7.56-7.04 (m, 14H), 6.94-6.71 (m, 4H), 5.98 (d, J=7.1 Hz, 1H), 5.62-5.23 (m, 2H), 3.71 (s, 6H); 3.68-3.44 (m, 2H), 3.36 (s, 3H), 3.01 (t, J=5.4 Hz, 2H), 1.30 (d, J=6.2 Hz, 3H), 0.74 (s, 9H), −0.06 (d, J=2.7 Hz, 6H). ¹³C NMR (126 MHz, DMSO-d₆) δ 164.68, 162.88, 158.01, 151.25, 144.68, 140.54, 135.48, 135.29, 131.12, 129.96, 129.51, 129.45, 128.61, 127.72, 127.49, 126.86, 126.60, 113.11, 113.07, 102.47, 78.80, 72.30, 62.90, 61.80, 55.01, 54.96, 25.56, 17.68, 15.69, −5.71. HRMS; [M+Na]⁺ calc. for C₄₇H₅₅F₃N₂O₁₀SiNa, 915.3476; found: 915.3460.

[0765] Synthesis of compound 66: To a solution of compound 58 (100 mg, 0.148 mmol), DMAP (1.8 mg, 0.02 mmol), Et₃N (103 μL, 0.740 mmol) in dry MeCN (2 mL) was added (R)-(−)-MTPACl (33.2 μL, 0.178 mmol) dropwisely. The reaction mixture was stirred for 5 h at room temperature and then the resulting mixture was diluted with AcOEt. The reaction was quenched with saturated aq. NaHCO₃. The organic layer was separated, washed with brine and concentrated in vacuo. The crude residue was purified by flash column chromatography on silica gel to afford compound 66 as a colorless foam (102 mg, 78%). ¹H NMR (400 MHz, DMSO-d₆) δ 11.28 (d, J=2.0 Hz, 1H), 7.56-7.02 (m, 15H), 6.98-6.71 (m, 4H), 5.89 (d, J=7.3 Hz, 1H), 5.54-5.29 (m, 2H), 3.72 (d, J=1.3 Hz, 6H), 3.67-3.44 (m, 3H), 3.40 (s, 3H); 3.11-2.85 (m, 2H), 1.39 (d, J=6.2 Hz, 3H), 0.75 (s, 9H), −0.06 (d, J=1.9 Hz, 6H). ¹³C NMR (126 MHz, DMSO-d₆) δ 164.54, 162.83, 158.02, 158.00, 151.10, 144.68, 135.50, 135.31, 131.00, 129.90, 129.49, 129.43, 128.57, 127.71, 127.49, 126.71, 126.58, 113.12, 113.07, 102.39, 85.54, 78.70, 71.71, 62.82, 61.77, 55.17, 54.97, 39.25, 25.57, 17.70, 16.08, −5.70, −5.72. HRMS; [M+Na]⁺ calc. for C₄₇H₅₅F₃N₂O₁₀SiNa, 915.3476; found: 915.3466.

### Synthesis of 3′-(S)-Methyl-U-UNA Building Blocks

[chemical structure]

[0766] Synthesis of compound 72: To a solution of compound 71 (9 g, 34.9 mmol) in pyridine (350 mL) were added DMAP (426 mg, 3.49 mmol) and TBDPSCl (13.6 mL, 52.4 mmol) dropwisely. The resulting mixture was stirred for 12 h, and then diluted with DCM. The reaction was quenched with saturated aq. NaHCO₃. The organic layer was separated, washed with brine and removed in vacuo. The crude residue was purified by flash column chromatography on silica gel to afford compound 72 as a colorless foam (16 g, 92%). 1H NMR (400 MHz, DMSO-d6) δ 11.27 (d, J=2.2 Hz, 1H), 7.84-7.27 (m, 11H), 5.89 (d, J=5.6 Hz, 1H), 5.62 (s, 1H), 5.49 (dd, J=8.2, 2.2 Hz, 1H), 5.04 (s, 1H), 4.02-3.60 (m, 4H), 1.11 (s, 3H), 0.99 (s, 9H). 13C NMR (101 MHz, DMSO-d6) δ 163.23, 150.43, 141.24, 135.13, 135.08, 132.86, 132.65, 129.89, 127.90, 127.85, 100.27, 91.35, 86.74, 82.40, 77.33, 62.57, 26.57, 18.91, 18.70. HRMS; [M+H]⁺ calc. for C26H33N2O6Si, 497.2108; found: 497.2108.

[0767] Synthesis of compound 73: To a solution of compound 72 (12 g, 24.2 mmol) in DCM (240 mL) was added Pb(AcO)₄ (21.5 g, 48.4 mmol). The resulting mixture was vigorously stirred for 1 h, the reaction completion was checked by TLC. The reaction was quenched with brine. The resulting mixture was diluted with excess amount of Et₂O, and then the insoluble materials were filtered off through a celite pad. The organic layer was washed with brine, dried over Na₂SO₄ and evaporated in vacuo. The resulting keto-aldehyde colorless form was used for next step without further purification. A round-bottom flask was charged with η6-(p-cymene)-(S,S)—N-toluenesulfonyl-1,2-diphenylethylenediamine(1-)ruthenium(II) chloride (360 mg, 0.576 mmol, 2.5 mol %) and keto-aldehyde (12 g, 24.2 mmol), and the system was flushed with Argon 3 times. A solution of sodium formate (54.5 g, 800 mmol) in water (300 mL) was added, followed by ethyl acetate (75 mL). The resulting two-phase mixture was vigorously stirred for 24 h at room temperature. The organic phase was separated, and the aqueous phase was extracted with another 100 mL of ethyl acetate. The solvent was removed from the combined organic layers at reduced pressure on a rotary evaporator. The crude residue was purified by flash column chromatography on silica gel to afford compound 73 as a colorless foam (9.2 g, 76% over 2 steps). ¹H NMR (400 MHz, DMSO-d₆) δ 11.25 (s, 1H), 7.66-7.33 (m, 11H), 7.29-7.06 (m, 1H), 5.88 (dd, J=6.5, 4.9 Hz, 1H), 5.40 (d, J=8.0 Hz, 1H), 5.19-5.00 (m, 1H), 4.77 (d, J=4.8 Hz, 1H), 3.91-3.80 (m, 1H); 3.73-3.64 (m, 1H), 360-3.49 (m, 3H); 1.01 (d, J=6.3 Hz, 3H); 0.93 (s, 9H). ¹³C NMR (101 MHz, DMSO-d₆) δ 163.14, 151.28, 140.87, 134.96, 134.91, 132.73, 132.64, 129.83, 128.85, 128.15, 127.83, 125.26, 101.53, 84.06, 83.20, 65.48, 63.18, 61.16, 26.53, 18.63, 18.05. HRMS; [M+Na]⁺ calc. for C₂₆H₃₄N₂O₆SiNa, 521.2084; found: 521.2076.

[0768] Synthesis of compound 74: To a solution of compound 73 (3.6 g, 7.23 mmol) in dry pyridine (72 mL) were added DMAP (88 mg, 0.72 mmol) and Bz₂O (1.7 mg, 7.59 mmol). The reaction mixture was stirred for 5 h at room temperature and then the resulting mixture was diluted with DCM. The reaction was quenched with saturated aq. NaHCO₃. The organic layer was separated, washed with brine and removed in vacuo. The crude residue was purified by flash column chromatography on silica gel to afford compound 74 as a colorless form (3.7 g, 85%). ¹H NMR (400 MHz, DMSO-d₆) δ 11.37 (d, J=1.9 Hz, 1H), 8.03-7.82 (m, 2H), 7.82-7.29 (m, 14H), 6.31 (t, J=5.6 Hz, 1H), 5.43 (dd, J=8.1, 1.8 Hz, 1H), 4.89 (d, J=4.6 Hz, 1H), 4.63 (dd, J=11.6, 5.1 Hz, 1H), 4.46 (dd, J=11.5, 6.2 Hz, 1H), 3.89 (s, 1H), 3.77-3.42 (m, 3H), 1.03 (d, J=6.5 Hz, 3H), 0.94 (s, 9H). ¹³C NMR (126 MHz, DMSO-d₆) δ 165.00, 162.97, 150.90, 149.56, 140.29, 135.03, 134.96, 134.92, 133.57, 132.65, 132.57, 129.86, 129.14, 129.11, 128.98, 128.76, 127.85, 127.82, 101.96, 83.37, 81.29, 65.52, 63.47, 63.11, 39.24, 26.53, 18.63, 17.85.

[0769] Synthesis of compound 75: To a solution of compound 74 (3.8 g, 6.31 mmol) in dry THF (50 mL) was added 1 M TBAF in THF solution (12.6 mL, 12.6 mmol). The reaction mixture was stirred for 1 h at room temperature and then the resulting mixture was diluted with AcOEt. The reaction was poured into saturated aq.NH₄Cl. The organic layer was separated, washed with brine and removed in vacuo. The crude residue was purified by flash column chromatography on silica gel to afford compound 75 as a colorless foam (2.2 g, 95%). ¹H NMR (400 MHz, DMSO-d₆) δ 11.28 (s, 1H), 7.98-7.84 (m, 2H), 7.84-7.44 (m, 4H), 6.25 (t, J=5.8 Hz, 1H), 5.61 (d, J=8.0 Hz, 1H), 4.88-4.70 (m, 1H), 4.58 (dt, J=9.5, 5.4 Hz, 2H), 4.40 (dd, J=11.5, 6.3 Hz, 1H), 3.76 (ddd, J=9.0, 6.5, 4.4 Hz, 1H), 3.55-3.21 (m, 3H), 1.07 (d, J=6.4 Hz, 3H). ¹³C NMR (126 MHz, DMSO-d₆) δ 165.04, 163.26, 151.03, 140.96, 133.59, 129.33-128.63 (m), 101.46, 84.39, 81.57, 65.83, 63.63, 60.70, 17.95.

[0770] Synthesis of compound 76: To a solution of compound 75 (3.1 g, 8.52 mmol) in dry pyridine (85 mL) was added DMTrCl (3.17 g, 9.37 mmol). The reaction mixture was stirred for 5 h at room temperature and then diluted with DCM. The reaction was quenched with saturated aq. NaHCO₃. The organic layer was separated, washed with brine and removed in vacuo. The crude residue was purified by flash column chromatography on silica gel to afford compound 76 as a colorless foam (5.2 g, 98%). ¹H NMR (400 MHz, DMSO-d₆) δ 11.41 (s, 1H), 7.96-7.82 (m, 2H), 7.82-7.43 (m, 4H), 7.41-7.04 (m, 9H), 7.02-6.73 (m, 4H), 6.32-6.12 (m, 1H), 5.51 (d, J=8.1 Hz, 1H), 4.84 (d, J=4.5 Hz, 1H), 4.65 (dd, J=11.6, 5.2 Hz, 1H), 4.49 (dd, J=11.5, 6.8 Hz, 1H), 3.79-3.61 (m, 8H), 3.17-2.74 (m, 2H), 0.90 (d, J=6.4 Hz, 3H). ¹³C NMR (126 MHz, DMSO-d₆) δ 164.99, 163.04, 157.97, 157.94, 151.05, 144.70, 140.63, 135.53, 135.44, 133.60, 129.54, 129.45, 129.12, 128.99, 128.80, 127.73, 127.65, 127.57, 126.57, 113.10, 113.08, 102.08, 85.57, 82.77, 81.62, 66.04, 63.31, 62.91, 59.71, 54.96, 39.05, 17.87, 14.05.

[0771] Synthesis of compound 77: To a solution of compound 76 (2.5 g, 3.75 mmol) in dry DCM (38 mL) were added DIPEA (2 mL, 11.3 mmol) and 2-cyanoethylchloro-N,N-diisopropylphosphoramidite (921 μL, 14.13 mmol) dropwisely. The reaction mixture was stirred for 1 h at room temperature, then diluted with DCM and quenched the reaction with saturated aq. NaHCO₃. The organic layer was separated, washed with brine and concentrated in vacuo. The crude residue was purified by flash column chromatography on silica gel to afford compound 77 as a colorless foam (2.8 g, 86%). ¹H NMR (500 MHz, Acetonitrile-d₃) δ 9.03 (s, 1H); 7.96 (ddt, J=8.4, 3.1, 1.7 Hz, 2H), 7.73-7.12 (m, 13H), 6.83 (ddd, J=8.9, 4.1, 2.1 Hz, 4H), 6.30 (dt, J=8.8, 5.3 Hz, 1H), 4.61-4.35 (m, 2H), 4.19-3.98 (m, 1H), 3.82-3.40 (m, 12H), 3.28-2.99 (m, 2H), 2.65-2.53 (m, 2H), 1.26-0.89 (m, 15H). ¹³C NMR (126 MHz, Acetonitrile-d₃) δ 159.70, 136.91, 134.49, 131.01, 130.99, 130.94, 130.54, 129.70, 128.98, 128.89, 127.87, 118.36, 114.12, 103.11, 64.81, 64.15, 55.97, 43.97, 43.87, 25.02, 24.95, 24.87, 1.89, 1.33, 1.22, 1.06. ³¹P NMR (202 MHz, Acetonitrile-d₃) δ 148.99, 148.80.

[0772] Synthesis of compound 78: Standard succination of compound 76 using succinic anhydride and DMAP in CH₂Cl₂ followed by CPG loading using HBTU and DIPEA in DMF gives compound 78.

### Synthesis of 3′-(R)-Methyl-U-UNA Building Blocks

[chemical structure]

[0773] Synthesis of compound 79: To a solution of compound 76 (3.37 g, 5.06 mmol) in dry THF (50 mL) were added PPh₃ (2.70 g, 15.2 mmol), BzOH (1.85 g, 15.2 mmol) and DIAD (2.99 mL, 15.2 mmol) dropwisely. The reaction mixture was stirred for 5 h at room temperature, the reaction completion was checked by TLC. The solvent was removed in vacuo. The crude residue was purified by flash column chromatography on silica gel to afford a di-benzoylated nucleoside. This compound was dissolved in THF (50 mL). To the solution of the mixture was added 1N aq. NaOH (10 mL) dropwisely. Resulting mixture was stirred for 12 h then the solvent was removed in vacuo. The crude residue was purified by flash column chromatography on silica gel to afford compound 79 as a colorless foam (2.2 g, 77% in 2 steps). ¹H NMR (500 MHz, DMSO-d₆) δ 11.48-11.15 (m, 1H), 7.62 (d, J=8.0 Hz, 1H), 7.39-7.04 (m, 8H), 6.97-6.67 (m, 4H), 5.81 (t, J=5.9 Hz, 1H), 5.49 (dd, J=8.0, 1.5 Hz, 1H), 5.17 (t, J=5.9 Hz, 1H), 4.74 (d, J=4.8 Hz, 1H), 3.95-3.40 (m, 10H), 3.11-2.79 (m, 2H), 0.86 (d, J=6.4 Hz, 3H). ¹³C NMR (126 MHz, DMSO-d₆) δ 163.21, 157.94, 151.39, 144.76, 141.16, 135.55, 135.54, 129.57, 129.48, 127.71, 127.60, 126.53, 113.08, 113.06, 101.67, 85.29, 84.77, 82.99, 65.87, 62.86, 61.15, 54.97, 39.25, 39.08, 18.53.

[0774] Synthesis of compound 80: To a solution of compound 79 (2 g, 3.56 mmol) in dry pyridine (36 mL) were added DMAP (44 mg, 0.356 mmol) and Bz₂O (845 mg, 3.74 mmol). The reaction mixture was stirred for 5 h at room temperature and then the resulting mixture was diluted with DCM. The reaction was quenched with saturated aq. NaHCO₃. The organic layer was separated, washed with brine and removed in vacuo. The crude residue was purified by flash column chromatography on silica gel to afford compound 80 as a colorless foam (2.0 g, 84%). ¹H NMR (400 MHz, DMSO-d₆) δ 11.45 (d, J=2.2 Hz, 1H), 7.99-7.41 (m, 6H), 7.41-7.03 (m, 9H), 6.95-6.58 (m, 4H), 6.20 (t, J=6.0 Hz, 1H), 5.54 (dd, J=8.0, 2.1 Hz, 1H), 4.86 (d, J=4.9 Hz, 1H), 4.70 (dd, J=11.6, 5.5 Hz, 1H), 4.51 (dd, J=11.5, 6.6 Hz, 1H), 3.71 (s, 8H), 3.17-2.80 (m, 2H), 0.84 (d, J=6.4 Hz, 3H). ¹³C NMR (101 MHz, DMSO-d₆) δ 165.01, 163.07, 157.97, 157.94, 151.08, 144.73, 140.73, 135.51, 135.48, 133.66, 129.59, 129.50, 129.10, 128.99, 128.85, 127.74, 127.61, 126.57, 113.09, 102.18, 85.39, 83.15, 81.89, 65.73, 63.38, 62.73, 59.74, 54.98, 38.97, 18.48, 14.07.

[0775] Synthesis of compound 81: To a solution of compound 80 (2.00 g, 3.00 mmol) in dry DCM (30 mL) were added DIPEA (1.57 mL, 9.00 mmol) and 2-cyanoethylchloro-N,N-diisopropylphosphoramidite (737 μL, 3.30 mmol) dropwisely. The reaction mixture was stirred for 2 h at room temperature, then diluted with DCM and quenched the reaction with saturated aq. NaHCO₃. The organic layer was separated, washed with brine and concentrated in vacuo. The crude residue was purified by flash column chromatography on silica gel to afford compound 81 as a colorless foam (2.1 g, 81%). ¹H NMR (500 MHz, Acetonitrile-d3) δ 7.95 (ddd, J=8.4, 2.7, 1.4 Hz, 2H), 7.81-7.56 (m, 5H), 7.52-7.35 (m, 4H), 7.35-7.16 (m, 9H), 6.90-6.77 (m, 4H), 6.04 (dd, J=8.7, 6.8 Hz, 1H), 5.39 (dt, J=11.2, 6.5 Hz, 1H), 3.86-3.61 (m, 11H), 3.62-3.40 (m, 2H), 3.33-3.11 (m, 2H), 2.56 (q, J=5.9 Hz, 2H), 1.45 (dd, J=6.4, 3.9 Hz, 3H), 1.30-0.97 (m, 12H). ¹H NMR (500 MHz, Acetonitrile-d₃) δ 9.09 (s, 1H), 7.97 (dt, J=8.5, 1.6 Hz, 2H), 7.73-7.11 (m, 17H), 6.96-6.75 (m, 5H), 6.23 (td, J=5.5, 3.3 Hz, 1H), 5.50 (dd, J=8.1, 6.7 Hz, 1H), 4.67-4.38 (m, 3H), 4.28-3.99 (m, 2H), 3.86-3.40 (m, 15H), 3.25 (ddd, J=12.7, 10.5, 2.5 Hz, 1H), 3.18-3.02 (m, 1H), 1.29-0.92 (m, 23H). ¹³C NMR (101 MHz, CD₃CN) δ 166.53, 163.82, 159.67, 159.67, 151.98, 146.01, 141.42, 136.92, 134.55, 131.04, 131.04, 130.98, 130.48, 130.48, 129.75, 129.75, 128.86, 128.86, 127.83, 118.37, 114.07, 114.07, 103.32, 87.24, 83.13, 82.91, 70.44, 70.28, 64.81, 64.00, 61.03, 59.35, 55.95, 55.95, 46.01, 44.07, 24.94, 23.15, 21.01, 20.94, 17.81, 14.58, 2.01, 1.81, 1.60, 1.39, 1.19, 0.98, 0.77. ³¹P NMR (202 MHz, Acetonitrile-d₃) δ 149.12, 148.42.

[0776] Synthesis of compound 82: Standard succination of compound 80 using succinic anhydride and DMAP in CH₂Cl₂ followed by CPG loading using HBTU and DIPEA in DMF gives compound 82.

### Synthesis of 3′-Methyl-U-UNA Mosher Esters

[chemical structure]

[0777] Synthesis of compound 83: To a solution of compound 76 (150 mg, 0.225 mmol), DMAP (3 mg, 0.023 mmol), Et₃N (157 μL, 1.13 mmol) in dry MeCN (3 mL) was added (S)-(+)-MTPACl (50.5 μL, 0.27 mmol) dropwisely. The reaction mixture was stirred for 3 h at room temperature and then diluted with AcOEt. The reaction was quenched with saturated aq.NaHCO₃. The organic layer was separated, washed with brine and removed in vacuo. The crude residue was purified by flash column chromatography on silica gel to afford compound 83 as a colorless foam (161 mg, 81%). ¹H NMR (400 MHz, DMSO-d₆) δ 11.47 (d, J=2.0 Hz, 1H), 7.99-7.74 (m, 2H), 7.74-7.58 (m, 2H), 7.58-7.00 (m, 16H), 7.00-6.63 (m, 4H), 6.05 (t, J=5.8 Hz, 1H), 5.62-5.34 (m, 2H), 3.72 (s, 7H), 3.37 (s, 3H), 2.97 (t, J=5.6 Hz, 2H), 1.13 (dd, J=15.8, 6.9 Hz, 3H). ¹³C NMR (126 MHz, DMSO-d₆) δ 164.93, 164.86, 162.93, 158.04, 151.01, 144.42, 140.43, 135.27, 135.11, 133.64, 131.35, 129.69, 129.43, 129.38, 129.12, 128.82, 128.76, 128.53, 128.41, 127.77, 127.46, 126.93, 126.67, 124.22, 113.14, 113.11, 102.27, 85.96, 83.81, 81.17, 79.91, 72.52, 63.05, 61.94, 55.15, 54.97, 14.72.

[0778] Synthesis of compound 84: To a solution of compound 76 (150 mg, 0.225 mmol), DMAP (3 mg, 0.023 mmol), Et₃N (157 μL, 1.13 mmol) in dry MeCN (3 mL) was added (R)-(−)-MTPACl (50.5 μL, 0.27 mmol) dropwisely. The reaction mixture was stirred for 3 h at room temperature and then diluted with AcOEt. The reaction was quenched with saturated aq.NaHCO₃. The organic layer was separated, washed with brine and removed in vacuo. The crude residue was purified by flash column chromatography on silica gel to afford compound 84 as a colorless foam (139 mg, 70%). ¹H NMR (400 MHz, DMSO-d₆) δ 11.49 (s, 1H), 7.94-6.98 (m, 20H), 6.96-6.61 (m, 4H), 6.16 (t, J=5.8 Hz, 1H), 5.55 (d, J=8.0 Hz, 1H), 5.38 (qd, J=6.4, 2.1 Hz, 1H), 4.40 (ddd, J=40.1, 11.5, 5.7 Hz, 2H), 3.87 (ddd, J=6.8, 3.8, 1.9 Hz, 1H), 3.38 (s, 3H), 3.19-2.85 (m, 2H), 1.03 (d, J=6.6 Hz, 3H). ¹³C NMR (126 MHz, DMSO-d₆) δ 164.91, 164.83, 162.98, 158.04, 158.02, 151.07, 144.39, 140.53, 135.23, 135.13, 133.60, 131.46, 129.72, 129.47, 129.41, 129.06, 128.79, 128.75, 128.45, 127.76, 127.51, 126.79, 126.67, 113.13, 113.11, 102.35, 85.96, 81.12, 79.65, 72.78, 63.15, 61.95, 55.27, 54.96, 14.37.

[0779] Synthesis of compound 85: To a solution of compound 79 (100 mg, 0.150 mmol), DMAP (2 mg, 0.02 mmol), Et₃N (104 μL, 0.750 mmol) in dry MeCN (3 mL) was added (S)-(+)-MTPACl (33.6 μL, 0.180 mmol) dropwisely. The reaction mixture was stirred for 5 h at room temperature and then diluted with AcOEt. The reaction was quenched with saturated aq.NaHCO₃. The organic layer was separated, washed with brine and removed in vacuo. The crude residue was purified by flash column chromatography on silica gel to afford compound 85 as a colorless foam (101 mg, 76%). ¹H NMR (400 MHz, DMSO-d₆) δ 11.46 (d, J=2.2 Hz, 1H), 8.03-7.74 (m, 2H), 7.80-7.02 (m, 18H), 6.82 (dd, J=8.9, 2.7 Hz, 4H), 6.16 (t, J=5.9 Hz, 1H), 5.47 (ddd, J=54.4, 7.4, 3.0 Hz, 2H), 4.53 (ddd, J=48.6, 11.6, 5.9 Hz, 2H), 4.09-3.95 (m, 2H), 3.71 (d, J=1.7 Hz, 6H), 3.22 (s, 3H), 3.02 (ddd, J=35.9, 10.3, 5.6 Hz, 2H), 1.15-1.06 (m, 3H). ¹³C NMR (126 MHz, DMSO-d₆) δ 165.10, 164.92, 162.88, 158.07, 150.86, 144.32, 140.26, 135.11, 135.04, 133.66, 131.08, 129.85, 129.44, 129.39, 129.08, 128.84, 128.80, 128.54, 127.78, 127.46, 127.02, 126.71, 113.14, 113.11, 102.37, 85.81, 82.15, 79.51, 72.05, 63.29, 62.03, 59.72, 55.05, 54.97, 39.24, 20.71, 14.54, 14.04.

[0780] Synthesis of compound 86: To a solution of compound 79 (100 mg, 0.150 mmol), DMAP (2 mg, 0.02 mmol), Et₃N (104 μL, 0.750 mmol) in dry MeCN (3 mL) was added (R)-(−)-MTPACl (33.6 μL, 0.180 mmol) dropwisely. The reaction mixture was stirred for 3 h at room temperature and then diluted with AcOEt. The reaction was quenched with saturated aq.NaHCO₃. The organic layer was separated, washed with brine and removed in vacuo. The crude residue was purified by flash column chromatography on silica gel to afford compound 86 as a colorless foam (89 mg, 67%). ¹H NMR (400 MHz, DMSO-d6) δ 11.45 (s, 1H), 7.96-7.80 (m, 2H), 7.72-6.96 (m, 18H), 6.92-6.69 (m, 4H), 6.11 (t, J=5.9 Hz, 1H), 5.67-5.21 (m, 2H), 4.55-4.31 (m, 2H), 3.97-3.85 (m, 1H), 3.71 (d, J=1.4 Hz, 6H), 3.29 (s, 3H), 2.92 (ddd, J=50.1, 10.2, 5.5 Hz, 2H), 1.24 (d, J=6.5 Hz, 3H). ¹³C NMR (126 MHz, DMSO-d₆) δ 165.05, 164.89, 162.85, 158.04, 150.83, 144.35, 140.12, 135.10, 135.06, 133.69, 131.14, 129.84, 129.45, 129.36, 129.09, 128.87, 128.82, 128.52, 127.74, 127.43, 126.94, 126.80, 126.67, 124.14, 121.85, 113.09, 113.06, 102.37, 85.70, 81.90, 79.45, 72.34, 63.17, 62.10, 59.72, 55.11, 54.97, 39.24, 20.72, 14.88, 14.04.

Synthesis of isoC-GNA Building Blocks

[chemical structure]

[0781] Synthesis of compound 102: To a solution of compound 100 (1.90 g, 5.85 mmol) in anhydrous DMF (34 mL) was added NaH (60% in mineral oil; 137 mg, 3.42 mmol, 0.2 eq.). The reaction mixture was stirred at room temperature for 1 h then a solution of compound 101 (5.85 g, 15.5 mmol) was added. The mixture was heated at 110° C. for 18 h. After removing the solvent under reduced pressure, the residue was extracted with EtOAc and H₂O. The organic layer was separated, dried over anhydrous Na₂SO₄, filtered and concentrated. The crude material was purified by flash column chromatography on silica gel (0-10% MeOH in CH₂Cl₂) to obtain compound 102 as a slightly yellow foam (3.27 g, 6.71 mmol, 43%, R_{f}=0.44; developed with 8% MeOH in CH₂Cl₂). ¹H NMR (400 MHz, DMSO-d₆) δ 7.44 (d, J=7.3 Hz, 2H), 7.36-7.11 (m, 8H), 6.97-6.83 (m, 4H), 6.73 (s, 2H), 5.47 (dt, J=14.4, 7.3 Hz, 2H), 3.93 (brs, 1H), 3.85 (d, J=3.3 Hz, 1H), 3.74 (s, 6H), 3.70-3.58 (m, 1H), 2.96 (ddd, J=28.5, 9.4, 5.0 Hz, 2H).

[0782] Synthesis of compound 103: To a solution of compound 102 (3.25 g, 6.67 mmol) in MeOH (40 mL) was added N,N-dimethylformamide dimethyl acetal (1.77 mL, 13.3 mmol). The reaction mixture was stirred at room temperature overnight. After removing the solvent under reduced pressure, the residue was purified by flash column chromatography on silica gel (0-8% MeOH in CH₂Cl₂) to obtain compound 103 as a slightly yellow foam (3.47 g, 6.39 mmol, 96%, R_{f}=0.41; developed with 8% MeOH in CH₂Cl₂). ¹H NMR (400 MHz, DMSO-d₆) δ 8.59 (s, 1H), 7.40 (d, J=7.3 Hz, 2H), 7.37-7.19 (m, 8H), 6.94-6.82 (m, 4H), 5.59 (d, J=7.5 Hz, 1H), 5.17 (d, J=5.9 Hz, 1H), 4.43 (dd, J=13.4, 3.5 Hz, 1H), 3.97 (s, 1H), 3.74 (s, 6H), 3.51 (dd, J=13.4, 8.6 Hz, 1H), 3.17 (s, 3H), 3.00-2.96 (m, 4H), 2.92-2.82 (m, 1H).

[0783] Synthesis of compound 104: To a solution of compound 103 (2.00 g, 3.69 mmol) in CH₂Cl₂ (20 mL) and N,N-diisopropylethylamine (1.29 mL, 7.38 mmol) was added 2-cyanoethyl N,N-diisopropylchlorophosphoramidite (1.32 mL, 5.90 mmol). The reaction mixture was stirred at room temperature overnight under argon atmosphere. The reaction mixture was diluted with CH₂Cl₂ (200 mL) then washed with saturated NaHCO₃ aqueous solution (100 mL). The organic layer was separated, dried over anhydrous Na₂SO₄, filtered and concentrated. The crude material was purified by flash column chromatography on silica gel (33-100% EtOAc in hexane then CH₂Cl₂:acetone:Et₃N=50:50:1) to obtain compound 104 (880 mg, 1.18 mmol, 32%, R_{f}=0.41 developed with 8% MeOH in CH₂Cl₂) as a slightly yellow foam. ³¹P NMR (202 MHz, CD₃CN): δ 150.28, 149.99.

[0784] Synthesis of compound 105: Compound 103 (250 mg, 0.461 mmol) was treated with 80% AcOH (10 mL) overnight. After removing the solvent, the crude was purified by flash column chromatography on silica gel (0-20% MeOH in CH₂Cl₂) to obtain compound 105 (83 mg, 0.345 mmol, 75%, R_{f}=0.26; developed with 15% MeOH in CH₂Cl₂). ¹H NMR (400 MHz, DMSO-d₆) δ 8.58 (s, 1H), 7.41 (d, J=7.5 Hz, 1H), 5.64 (d, J=7.4 Hz, 1H), 4.96 (d, J=5.7 Hz, 1H), 4.72 (t, J=5.6 Hz, 1H), 4.31 (dd, J=13.4, 3.4 Hz, 1H), 3.74 (ddd, J=9.0, 5.8, 3.4 Hz, 1H), 3.49 (dd, J=13.4, 8.4 Hz, 1H), 3.42-3.24 (m, 1H), 3.17 (s, 3H), 3.03 (s, 3H).

[0785] Synthesis of compound 106: Standard succination of compound 103 using succinic anhydride and DMAP in CH₂Cl₂ followed by CPG loading using HBTU and DIPEA in DMF gives compound 106.

Synthesis of isoG-GNA Building Blocks

[chemical structure]

[chemical structure]

[0786] Synthesis of compound 107: To a suspension of 2,6-diaminopurine (9.38 g, 62.5 mmol) in anhydrous DMF (125 mL) was added NaH (60% in mineral oil; 500 mg, 12.5 mmol, 0.2 eq.). The reaction mixture was stirred at room temperature for 1 h then a solution of compound 101 (22.4 g, 59.5 mmol) in DMF (100 mL) was added. The mixture was heated at 110° C. for 21 h. After removing the solvent under reduced pressure, the crude material was purified by flash column chromatography on silica gel (0-10% MeOH in CH₂Cl₂) to obtain compound 107 as a slightly yellow foam (19.3 g, 36.6 mmol, 61%, R_{f}=0.33; developed with 8% MeOH in CH₂Cl₂). ¹H NMR (400 MHz, DMSO-d₆) δ 7.57 (s, 1H), 7.46-7.36 (m, 2H), 7.36-7.12 (m, 8H), 6.87 (dd, J=8.9, 3.3 Hz, 4H), 6.61 (s, 2H), 5.71 (s, 2H), 5.43 (d, J=5.3 Hz, 1H), 4.16-3.88 (m, 3H), 3.74 (s, 6H), 2.96-2.86 (m, 2H).

[0787] Synthesis of compound 108: Compound 107 (19.0 g, 36.1 mmol) was treated with 80% AcOH (500 mL) overnight. After removing the solvent, the residue was dissolved in toluene (200 mL) and CH₂Cl₂ (100 mL). White precipitation was formed and filtered. The solid was washed with CH₂Cl₂ to give compound 108 as an off-white powder (8.68 g, 30.5 mmol, 84% as acetate salt, R_{f}=0.18; developed with 20% MeOH in CH₂Cl₂). ¹H NMR (400 MHz, DMSO-d₆) δ 7.61 (s, 1H), 6.65 (s, 2H), 5.79 (s, 2H), 4.09 (dd, J=13.8, 3.6 Hz, 1H), 3.94-3.66 (m, 2H), 3.51-3.06 (m, 2H), 1.91 (s, 3H).

[0788] Synthesis of compound 109: To a suspension of compound 108 (7.88 g, 27.7 mmol) in H₂O (250 mL) was added a solution of NaNO₂ (7.41 g, 107.4 mmol) in H₂O (47 mL) at 50° C. Then AcOH (11.1 mL, 193.9 mmol) was added dropwise. The mixture was heated at 50° C. for 10 min then cooled to room temperature and diluted with H₂O (250 mL). Conc. NH₄OH was added to the solution to adjust the pH 8. The solution was evaporated and the residue was re-suspended in H₂O (250 mL). The resulting precipitation was filtered and the case was dried in vacuo. The material was transferred to flask then co-evaporated with toluene then dried in vacuo overnight to give compound 109 as a pale purple solid (7.61 g, 96%). ¹H NMR (500 MHz, DMSO-d₆) δ 7.62 (s, 1H), 4.02 (dd, J=13.9, 3.6 Hz, 1H), 3.81 (dd, J=14.0, 7.1 Hz, 1H), 3.77-3.68 (m, 1H), 3.34 (dd, J=11.2, 5.1 Hz, 1H), 3.21 (dd, J=11.2, 6.4 Hz, 1H), 1.83 (s, 3H).

[0789] Synthesis of compound 110: To a suspension of compound 109 (3.03 g, 13.5 mmol) in MeOH (54 mL) was added N,N-dimethylformamide dimethyl acetal (3.57 mL, 26.9 mmol). The reaction mixture was stirred for 15 h at room temperature. Additional N,N-dimethylformamide dimethyl acetal (1.8 mL) and MeOH (20 mL) were added then heated at 55° C. for 3 h. The mixture was evaporated and the residue was dried in vacuo to give compound 110 as a grey powder (3.68 g, 13.1 mmol, 97%). ¹H NMR (400 MHz, DMSO-d₆) δ 10.97 (s, 1H), 9.20 (s, 1H), 7.77 (s, 1H), 5.14 (d, J=4.9 Hz, 1H), 4.95 (t, J=5.9 Hz, 1H), 4.16-3.94 (m, 1H), 3.92-3.66 (m, 2H), 3.39-3.20 (m, 2H), 3.20 (s, 3H), 3.10 (s, 3H).

[0790] Synthesis of compound 111: To a suspension of compound 110 (3.66 g, 13.1 mmol) in anhydrous pyridine (180 mL) and N,N-diisopropylethylamine (2.97 mL, 17.0 mmol) was added diphenylcarbamoyl chloride (3.04 g, 13.1 mmol). The reaction mixture was stirred at room temperature for 2 h then quenched with saturated aq. NaHCO₃ (50 mL). The mixture was extracted with CH₂Cl₂ (300 mL) and the organic layer was separated, dried over anhydrous Na₂SO₄, filtered and concentrated. The crude material was purified by flash column chromatography on silica gel (0-8% MeOH in CH₂Cl₂) to obtain 111 (2.82 g, 5.93 mmol, 45%, R_{f}=0.24 developed with 8% MeOH in CH₂Cl₂) as a brown foam. ¹H NMR (400 MHz, DMSO-d₆) δ 8.93 (s, 1H), 8.14 (s, 1H), 7.44-7.28 (m, 10H), 5.09 (d, J=5.4 Hz, 1H), 4.82 (t, J=5.6 Hz, 1H), 4.28 (dd, J=13.9, 3.5 Hz, 1H), 3.99 (dd, J=13.9, 8.5 Hz, 1H), 3.84-3.80 (m, 1H), 3.44-3.33 (m, 2H), 3.21 (s, 3H), 3.13 (s, 3H).

[0791] Synthesis of compound 112: To a solution of compound 111 (385 mg, 0.810 mmol) in pyridine (4 mL) was added DMTrCl (274 mg, 0.810 mmol) and the mixture was stirred overnight. After removing the solvent, the residue was purified by flash column chromatography on silica gel (0-8% MeOH in CH₂Cl₂) to give compound 112 (392 mg, 0.504 mmol, 62%, R_{f}=0.34 developed with 5% MeOH in CH₂Cl₂) as a pale yellow foam. ¹H NMR (400 MHz, DMSO-d₆) δ 8.91 (s, 1H), 8.09 (s, 1H), 7.47-7.11 (m, 21H), 6.83 (dd, J=9.0, 3.2 Hz, 4H), 5.33 (d, J=5.4 Hz, 1H), 4.32 (dd, J=13.6, 3.6 Hz, 1H), 4.17-3.95 (m, 2H), 3.70 (s, 6H), 3.22 (s, 3H), 3.13 (s, 3H), 3.00 (dd, J=9.3, 5.0 Hz, 1H), 2.86 (dd, J=9.4, 6.0 Hz, 1H).

[0792] Synthesis of compound 113: Standard phosphitylation of compound 112 using 2-cyanoethyl N,N-diisopropyl-chlorophosphoramidite and DIPEA in CH₂Cl₂ gives compound 113 in 80% yield. ³¹P NMR (202 MHz, CD₃CN) δ 150.65, 149.98.

[0793] Synthesis of compound 114: Standard succination of compound 112 using succinic anhydride and DMAP in CH₂Cl₂ followed by CPG loading using HBTU and DIPEA in DMF gives compound 114. Loading of 114: 79 gmol/g.

### Synthesis of 3′-C—(R)-Methyl-4′-(S)—U-UNA Building Blocks

[chemical structure]

[chemical structure]

[0794] Synthesis of compound 202: To a suspension of compound 201 (2.00 g, 6.44 mmol) in anhydrous toluene (45 mL) were added PPh₃ (2.03 g, 7.73 mmol) and DIAD (1.50 mL, 7.73 mmol). The reaction mixture was stirred at 110° C. for 22 h. After removing the solvent under reduced pressure, the residue was extracted with EtOAc and saturated NaHCO₃ aqueous solution. The organic layer was separated, dried over anhydrous Na₂SO₄, filtered and concentrated. The crude material was purified by flash column chromatography on silica gel (0-33% EtOAc in hexane) to obtain compound 202 (1.83 g, 6.26 mmol, 97%, R_{f}=0.33; developed with 20% EtOAc in hexanes). ¹H NMR (400 MHz, DMSO-d₆): δ 7.44-7.24 (m, 5H), 5.75 (d, J=3.7 Hz, 1H), 4.76 (t, J=4.1 Hz, 1H), 4.63 (d, J=11.7 Hz, 1H), 4.50 (d, J=11.6 Hz, 1H), 3.97 (dd, J=8.9, 3.4 Hz, 1H), 3.67 (dd, J=8.9, 4.4 Hz, 1H), 3.18-3.12 (m, 1H), 2.74 (dd, J=5.3, 4.3 Hz, 1H), 2.61 (dd, J=5.3, 2.7 Hz, 1H), 1.45 (s, 3H), 1.29 (s, 3H)¹³C NMR (126 MHz, DMSO-d₆): δ 137.67, 128.26, 127.75, 127.67, 111.90, 103.66, 77.63, 77.08, 76.79, 70.83, 50.23, 43.47, 26.64, 26.52.

[0795] Synthesis of compound 203: To a solution of compound 202 (1.82 g, 6.23 mmol) in THF (40 mL) was added 2M LiAlH₄ in THF (2.50 mL, 4.98 mmol) at −10° C. The reaction mixture was stirred at −10° C. for 30 min then at room temperature for 2 h. After removing the solvent under reduced pressure, the residue was purified by flash column chromatography on silica gel (0-50% EtOAc in hexane) to obtain compound 203 (1.83 g, 6.22 mmol, quant., R_{f}=0.42; developed with 50% EtOAc in hexanes). ¹H NMR (400 MHz, DMSO-d₆): δ 7.43-7.23 (m, 5H), 5.71 (d, J=3.8 Hz, 1H), 4.72 (t, J=3.8 Hz, 1H), 4.68-4.60 (m, 2H), 4.50 (d, J=11.7 Hz, 1H), 3.88-3.74 (m, 3H), 1.45 (s, 3H), 1.30 (s, 3H), 1.03 (d, J=6.5 Hz, 3H). ¹³C NMR (126 MHz, DMSO-d₆): δ 138.10, 128.18, 127.56, 127.49, 111.60, 103.76, 81.96, 77.26, 77.24, 70.82, 65.15, 26.76, 26.71, 18.26.

[0796] Synthesis of compound 204: To a solution of compound 203 (2.07 g, 7.03 mmol) in DMF (20 mL) were added TBDPSCl (2.73 mL, 10.5 mmol) and imidazole (1.44 g, 21.1 mmol), and the mixture was stirred at room temperature overnight. After removing the solvent under reduced pressure, the residue was extracted with CH₂Cl₂ and saturated NaHCO₃ aqueous solution. The organic layer was separated, dried over anhydrous Na₂SO₄, filtered and concentrated. The crude material was purified by flash column chromatography on silica gel (0-10% EtOAc in hexane) to obtain compound 204 (4.85 g, quant, R_{f}=0.41; developed with 10% EtOAc in hexane). ¹H NMR (400 MHz, DMSO-d₆): δ 7.70-7.55 (m, 7H), 7.51-7.22 (m, 15H), 5.63 (d, J=3.7 Hz, 1H), 4.79 (t, J=4.1 Hz, 1H), 4.67 (d, J=12.1 Hz, 1H), 4.46 (d, J=12.1 Hz, 1H), 4.10-3.92 (m, 3H), 3.88 (dd, J=8.8, 1.6 Hz, 1H), 1.42 (s, 3H), 1.30 (s, 3H), 0.953-0.947 (m, 12H).

[0797] Synthesis of compound 206: To a solution of compound 204 (3.00 g, 5.63 mmol) in AcOH (15 mL) and Ac₂O (3 mL) was added H₂SO₄ (10 drops) at 0° C. The reaction mixture was stirred at room temperature for 14 h. The solvent was removed under reduced pressure, and the residue was extracted with EtOAc and H₂O. The organic layer was separated, dried over anhydrous Na₂SO₄, filtered and concentrated. The crude material was co-evaporated with CH₃CN then used next step. To a solution of the crude material in CH₃CN (35 mL) were added uracil (1.88 g, 16.8 mmol) and N,O-bis(trimethylsilyl)acetamide (6.85 mL, 28.0 mmol). The mixture was stirred at 40° C. for 15 min the TMSOTf (1.52 mL, 8.40 mmol) was added at 0° C. The mixture was stirred at 80° C. for 2 h. Standard work-up and purification by flash column chromatography on silica gel (0-50% EtOAc in hexane) gave compound 206 (2.01 g, 3.20 mmol, 57%, R_{f}=0.32; developed with 50% EtOAc in hexane). ¹H NMR (400 MHz, DMSO-d₆): δ 11.43 (s, 1H), 7.66-7.59 (m, 4H), 7.55 (d, J=8.1 Hz, 1H), 7.51-7.22 (m, 12H), 5.84 (d, J=4.9 Hz, 1H), 5.51 (dd, J=8.1, 1.4 Hz, 1H), 5.41 (t, J=5.4 Hz, 1H), 4.58-4.43 (m, 2H), 4.40 (t, J=5.9 Hz, 1H), 4.14 (dd, J=6.4, 3.5 Hz, 1H), 3.87 (dd, J=5.8, 3.5 Hz, 1H), 2.06 (s, 3H), 1.07-0.95 (m, 9H), 0.90 (d, J=6.4 Hz, 3H). ¹³C NMR (126 MHz, DMSO-d₆): δ 169.69, 162.90, 150.26, 141.73, 137.60, 135.40, 135.26, 133.52, 133.27, 129.88, 129.87, 128.27, 127.76, 127.72, 127.70, 102.08, 87.52, 84.90, 74.88, 72.51, 71.92, 68.44, 26.82, 20.53, 18.79, 18.60.

[0798] Synthesis of compound 207: To a solution of compound 206 (1.94 g, 3.09 mmol) in MeOH (30 mL) was added K₂CO₃ (854 mg, 6.18 mmol) at 0° C. The reaction mixture was stirred for 3 h at 0° C. by addition of MeOH (0.2 mL). EtOAc (100 mL) and H₂O (20 mL) were added then extracted. The organic layer was separated, dried over anhydrous Na₂SO₄, filtered and concentrated. The crude material was purified by flash column chromatography on silica gel (0-75% EtOAc in hexane) to obtain compound 207 (1.68 g, 2.86 mmol, 93%, R_{f}=0.28; developed with 67% EtOAc in hexane). ¹H NMR (400 MHz, DMSO-d₆): δ 11.40 (d, J=2.2 Hz, 1H), 7.67-7.57 (m, 4H), 7.53-7.24 (m, 12H), 5.77 (d, J=6.6 Hz, 1H), 5.59 (d, J=6.3 Hz, 1H), 5.48 (dd, J=8.0, 2.1 Hz, 1H), 4.73 (d, J=12.0 Hz, 1H), 4.53 (d, J=12.0 Hz, 1H), 4.22 (q, J=6.2 Hz, 1H), 4.13-3.98 (m, 2H), 3.84 (t, J=4.2 Hz, 1H), 0.99 (s, 9H), 0.91 (d, J=6.3 Hz, 3H). ¹³C NMR (126 MHz, DMSO-d₆): δ 162.85, 150.73, 140.84, 138.27, 135.40, 135.22, 133.53, 133.38, 129.88, 128.15, 127.79, 127.74, 127.46, 127.41, 102.01, 87.51, 85.56, 76.32, 71.50, 71.29, 69.02, 26.82, 19.12, 18.82.

[0799] Synthesis of compound 208: To a solution of compound 207 (3.70 g, 6.31 mmol) in EtOH (150 mL) were added cyclohexene (32.1 mL, 0.317 mol, 50 eq.) and palladium hydroxide on carbon (20 wt. % loading; 2.23 g). The mixture was heated at 80° C. for 3 h. The reaction mixture was filtered through Celite then concentrated. The crude material was purified by flash column chromatography on silica gel (0-5% MeOH in CH₂Cl₂) to obtain compound 208 (2.80 g, 5.64 mmol, 89%, R_{f}=0.16; developed with 5% MeOH in CH₂Cl₂). ¹H NMR (400 MHz, DMSO-d₆): δ 11.37 (d, J=2.2 Hz, 1H), 7.65-7.62 (m, 4H), 7.56-7.26 (m, 7H), 5.72 (d, J=6.4 Hz, 1H), 5.54-5.30 (m, 2H), 5.11 (d, J=5.4 Hz, 1H), 4.23-4.04 (m, 2H), 3.97 (q, J=6.1 Hz, 1H), 3.67 (t, J=4.2 Hz, 1H), 1.02 (s, 9H), 0.96 (d, J=6.4 Hz, 3H). ¹³C NMR (126 MHz, DMSO-d₆): δ 162.85, 150.72, 140.85, 135.41, 135.24, 133.71, 133.50, 129.85, 129.83, 127.77, 127.73, 101.97, 87.42, 87.15, 71.88, 69.15, 68.91, 26.84, 19.20, 18.88.

[0800] Synthesis of compound 209: To a solution of compound 208 (2.80 g, 5.64 mmol) in dioxane (70 mL) was added a solution of NaIO₄ (1.33 g, 6.20 mmol) H₂O (12 mL) was added. The reaction mixture was vigorously stirred at ambient temperature for 2 hours. The reaction mixture was filtered through a sintered funnel, and the filter cake was washed with additional dioxane. To the filtrate was added NaBH₄ (320 mg, 8.46 mmol). After stirring at ambient temperature for 2 hours, the solvent was removed under reduced pressure. The crude material was purified by flash column chromatography (0-5% MeOH in DCM) to obtain compound 209 as a white foam (2.73 g, 5.47 mmol, 97%; R_{f}=0.20 developed with 5% MeOH in DCM). ¹H NMR (400 MHz, DMSO-d₆): δ 11.23 (d, J=2.1 Hz, 1H), 7.63-7.53 (m, 4H), 7.51-7.35 (m, 8H), 5.86 (dd, J=6.7, 5.0 Hz, 1H), 5.45 (dd, J=8.0, 2.1 Hz, 1H), 5.10 (t, J=5.9 Hz, 1H), 4.77 (t, J=5.3 Hz, 1H), 3.81 (dd, J=6.4, 3.5 Hz, 1H), 3.71-3.59 (m, 1H), 3.58-3.44 (m, 4H), 0.95 (s, 9H), 0.87 (d, J=6.3 Hz, 3H). ¹³C NMR (126 MHz, DMSO-d₆): δ 163.15, 151.33, 140.93, 135.38, 135.31, 133.73, 133.00, 129.81, 129.71, 127.72, 127.61, 101.56, 83.67, 83.58, 68.94, 61.31, 60.21, 26.75, 18.74, 18.54.

[0801] Synthesis of compound 210: To a solution of compound 209 (720 mg, 1.44 mmol) in anhydrous DCM (40 mL) and pyridine (1.17 mL, 14.4 mmol), cooled to −78° C., benzoyl chloride (0.184 mL, 1.58 mmol) was slowly added. After stirring at −78° C. for 2 hours, reaction mixture was brought to 0° C., and quenched with EtOH (1 mL). The mixture was diluted with DCM (40 mL) then washed with saturated aq. NaHCO₃ (20 mL). The organic layer was washed with brine, separated, dried over anhydrous Na₂SO₄, filtered, and concentrated. The crude residue was purified by flash column chromatography (0-80% EtOAC in hexanes) to give compound 210 as a white foam (361 mg, 0.599 mmol, 42%; R_{f}=0.64, developed with 80% EtOAc in hexanes). ¹H NMR (400 MHz, DMSO-d₆): δ 11.34 (s, 1H), 8.02-7.82 (m, 2H), 7.71-7.63 (m, 1H), 7.61-7.50 (m, 7H), 7.49-7.36 (m, 6H), 6.27 (dd, J=6.6, 5.1 Hz, 1H), 5.45 (d, J=8.0 Hz, 1H), 4.89 (t, J=5.0 Hz, 1H), 4.58 (dd, J=11.5, 5.1 Hz, 1H), 4.43 (dd, J=11.5, 6.6 Hz, 1H), 3.85 (dd, J=6.4, 2.8 Hz, 1H), 3.61-3.55 (m, 3H), 0.95 (s, 9H), 0.93 (d, J=6.4 Hz, 3H). ¹³C NMR (126 MHz, DMSO-d₆): δ 164.98, 162.97, 150.99, 140.24, 135.38, 135.31, 133.69, 133.62, 132.95, 129.85, 129.75, 129.11, 129.03, 128.82, 127.74, 127.63, 102.03, 83.76, 80.95, 69.13, 63.51, 60.35, 26.75, 18.75, 18.45.

[0802] Synthesis of compound 211: To a solution of compound 210 (585 mg, 0.971 mmol) in anhydrous pyridine (5 mL) was added DMTrCl (495 mg, 1.46 mmol). The reaction mixture was stirred at room temperature for 16 h. After removing the solvent, the residue was extracted with CH₂Cl₂ (100 mL) and saturated NaHCO₃ aqueous solution (50 mL). The organic layer was separated, dried over anhydrous Na₂SO₄, filtered and concentrated. The crude material was purified by flash column chromatography on silica gel (0-33% EtOAc in hexanes) to give compound 211 (764 mg, 0.844 mmol, 87%, R_{f}=0.22 developed with 33% EtOAc in hexanes) as a white foam. ¹H NMR (400 MHz, DMSO-d₆): δ 11.42 (s, 1H), 7.86-7.73 (m, 2H), 7.73-7.59 (m, 1H), 7.52-7.40 (m, 9H), 7.34 (tt, J=7.3, 4.0 Hz, 6H), 7.29-7.14 (m, 7H), 6.80 (dd, J=8.9, 3.1 Hz, 4H), 6.44 (t, J=5.9 Hz, 1H), 5.47 (d, J=8.0 Hz, 1H), 4.47 (dd, J=11.5, 5.5 Hz, 1H), 4.37 (dd, J=11.5, 6.4 Hz, 1H), 3.81 (dt, J=7.9, 4.2 Hz, 1H), 3.69 (d, J=5.9 Hz, 7H), 3.26 (dd, J=10.2, 4.5 Hz, 1H), 3.13 (dd, J=10.2, 7.1 Hz, 1H), 0.83 (s, 9H), 0.78 (d, J=6.3 Hz, 3H). ¹³C NMR (126 MHz, DMSO-d₆): δ 164.79, 162.97, 158.05, 158.01, 151.12, 144.60, 140.14, 135.51, 135.35, 135.30, 133.61, 133.43, 132.73, 129.84, 129.77, 129.58, 129.49, 129.08, 128.90, 128.74, 127.80, 127.68, 127.60, 127.54, 126.64, 113.11, 102.22, 86.15, 81.65, 81.21, 69.53, 63.42, 63.36, 54.97, 54.95, 26.63, 18.74, 18.63.

[0803] Synthesis of compound 212: Compound 211 (740 mg, 0.818 mmol) in THF (8 mL) was treated with 1 M n-TBAF in THF (1.06 mmol, 1.06 mL) overnight. After removing the solvent, the residue was purified by flash column chromatography on silica gel (0-66% EtOAc in hexane) to give compound 212 (226 mg, 0.339 mmol, 41%, R_{f}=0.25 developed with 66% EtOAc in hexane) as a white solid. This compound was also synthesized from compound 213 by standard dimethoxytritylation in 93% yield. ¹H NMR (400 MHz, DMSO-d₆): δ 11.38 (s, 1H), 7.88-7.76 (m, 3H), 7.72-7.61 (m, 1H), 7.49 (t, J=7.8 Hz, 2H), 7.44-7.37 (m, 2H), 7.32-7.24 (m, 6H), 7.24-7.16 (m, 1H), 6.84 (dd, J=8.7, 5.8 Hz, 4H), 6.45 (dd, J=7.1, 5.1 Hz, 1H), 5.67 (d, J=8.0 Hz, 1H), 4.64 (d, J=5.2 Hz, 1H), 4.55 (dd, J=11.6, 5.1 Hz, 1H), 4.48 (dd, J=11.5, 7.1 Hz, 1H), 3.69 (d, J=4.9 Hz, 6H), 3.66-3.57 (m, 1H), 3.51 (q, J=5.8 Hz, 1H), 3.27 (dd, J=10.3, 3.2 Hz, 1H), 3.08 (dd, J=10.2, 7.2 Hz, 1H), 0.89 (d, J=6.3 Hz, 3H). ¹³C NMR (126 MHz, DMSO-d₆): δ 164.85, 163.16, 158.02, 157.99, 151.32, 144.74, 141.09, 135.67, 135.54, 133.63, 129.65, 129.59, 129.11, 128.93, 128.79, 127.81, 127.68, 126.64, 113.15, 113.12, 101.91, 85.91, 82.29, 81.26, 65.61, 63.89, 63.28, 54.97, 54.95, 19.18.

[0804] Synthesis of compound 213: Compound 210 (361 mg, 0.599 mmol) in THF (5 mL) was treated with 1 M n-TBAF in THF (0.719 mmol, 0.719 mL) for 2 h After removing the solvent, the residue was purified by flash column chromatography on silica gel (0-100% EtOAc in hexane then 5% MeOH in EtOAc) to give compound 213 (209 mg, 0.574 mmol, 96%, R_{f}=0.29 developed with 5% MeOH in EtOAc) as a white solid. ¹H NMR (400 MHz, DMSO-d₆): δ 11.31 (s, 1H), 7.95-7.85 (m, 2H), 7.79 (d, J=8.1 Hz, 1H), 7.74-7.61 (m, 1H), 7.53 (t, J=7.8 Hz, 2H), 6.26 (dd, J=7.0, 5.1 Hz, 1H), 5.65 (d, J=8.0 Hz, 1H), 4.77 (t, J=5.4 Hz, 1H), 4.69-4.55 (m, 2H), 4.45 (dd, J=11.5, 7.1 Hz, 1H), 3.61 (ddt, J=13.8, 6.4, 4.5 Hz, 2H), 3.50 (dt, J=11.8, 6.1 Hz, 1H), 3.38-3.30 (m, 2H), 0.99 (d, J=6.3 Hz, 3H). ¹³C NMR (126 MHz, DMSO-d₆) δ 165.00, 163.18, 151.16, 141.11, 133.61, 129.13, 128.84, 101.64, 84.00, 65.12, 63.40, 60.77, 18.80.

[0805] Synthesis of compound 214: To a solution of compound 212 (1.25 g, 1.87 mmol) in DCM (15 ml) and DIPEA (0.651 ml, 3.74 mmol) were added 2-cyanoethyl N,N-diisopropylchlorophosphoramidite (0.544 mL, 2.44 mmol) and 1-methylimidazole (0.149 mL, 1.87 mmol) at 0° C. The mixture was stirred at room temperature for 2 h. The reaction mixture was diluted with CH₂Cl₂ (100 mL) then washed with saturated NaHCO₃ aqueous solution (50 mL). The organic layer was separated, dried over anhydrous Na₂SO₄, filtered and concentrated. The crude material was purified by flash column chromatography on silica gel (0-50% EtOAc in hexane) to give compound 214 (1.40 g, 1.61 mmol, 86%, R_{f}=0.20, 0.27 developed with 50% EtOAc in hexane) as a mixture of diastereomers. ¹H NMR (500 MHz, CD₃CN): δ 9.16 (s, 1H), 7.90-7.87 (m, 2H), 7.64-7.59 (m, 2H), 7.47-7.41 (m, 4H), 7.32-7.19 (m, 7H), 6.84-6.80 (m, 4H), 6.44 (q, J=5.7 Hz, 1H), 5.69 (dd, J=11.9, 8.1 Hz, 1H), 4.51 (ddd, J=23.0, 11.6, 5.3 Hz, 1H), 4.39 (ddd, J=20.8, 11.6, 6.0 Hz, 1H), 4.03-3.15 (m, 15H), 2.59 (t, J=6.0 Hz, 1H), 2.50 (t, J=6.0 Hz, 1H), 1.16-0.94 (m, 15H). ¹³C NMR (126 MHz, CD₃CN): δ 166.34, 163.98, 163.96, 159.66, 159.63, 152.04, 151.98, 146.00, 145.97, 141.59, 141.55, 136.93, 136.82, 136.74, 134.42, 134.39, 130.99, 130.93, 130.88, 130.44, 130.41, 130.39, 129.65, 129.63, 128.96, 128.88, 127.81, 118.29, 114.09, 114.08, 103.09, 103.04, 87.70, 87.66, 83.17, 83.14, 82.89, 82.76, 82.71, 71.45, 71.30, 70.72, 70.58, 64.72, 64.69, 64.67, 64.62, 59.41, 59.34, 59.27, 59.19, 55.87, 43.89, 43.79, 43.75, 43.66, 25.05, 24.99, 24.92, 24.86, 24.81, 24.69, 24.63, 20.99, 20.93, 20.91, 20.85, 18.29, 18.26, 17.65, 17.62. ³¹P NMR (202 MHz, CD₃CN): δ 149.38, 148.56.

[0806] Synthesis of compound 215: Standard succination of compound 212 using succinic anhydride and DMAP in CH₂Cl₂ followed by CPG loading using HBTU and DIPEA in DMF gives compound 215.

### Example 3. Synthesis of Building Blocks Containing Guanine Derivatives with Acyclic Sugar Structures

### Synthesis of 5′-(R)-Methyl-Guanine-UNA Building Blocks

[chemical structure]

[chemical structure]

[0807] Protected guanine analog 251 is coupled with 205 to give 252. Removal of acetyl group and benzyl group gives 254. TBDPS group is changed to DMTr group to give 255 then oxidative cleavage followed by reduction gives 256. Selective benzoylation gives 257, which is converted to amidite 258 and loaded onto CPG to give 259 using standard conditions.

### Synthesis of Inosine-UNA Building Blocks

[chemical structure]

[0808] Building blocks 263 and 264 is synthesized from 5′-DMTr protected inosine ribonucleoside 260 using similar procedures described for the other UNA derivatives described above.

### Synthesis of Inosine-GNA/SNA Building Blocks

[chemical structure]

[0809] Compound 266, inosine-GNA is synthesized from A-GNA 265 by treatment with adenosine deaminase. Subsequent DMTr protection followed by phosphitylation and CPG loading gives 268 and 269. Oxidative cleavage of diol in 266 followed by mild oxidation gives 270, which is coupled with 271 to give inosine-SNA (serinol nucleic acid) precursor 272. 273 and 274 can be synthesized as described above.

Synthesis of isoG-UNA Building Blocks

[chemical structure]

[chemical structure]

[0810] Starting from diaminoA ribonucleoside 275, similar procedures described for synthesis of isoG-GNA in scheme 11 gives 279. Standard producers for UNA analog synthesis described above can give isoG-UNA building blocks 282 and 283.

Synthesis of isoG-SNA Building Blocks

[chemical structure]

[0811] Oxidative cleavage of diol in 111 followed by mild oxidation gives 284, which is coupled with 271 to give isoG-SNA (serinol nucleic acid) precursor 285. 286 and 287 can be synthesized as described above.

### Synthesis of 2-Aminopurine-UNA Building Blocks

[chemical structure]

[0812] Starting from 2-aminopurine ribonucleoside 288, transient protection with TMS followed by exocyclic amino protection with iBuCl then alkali work-up gives 289. Standard producers for UNA analog synthesis described above can give 2-aminopurine-UNA building blocks 293 and 294.

### Synthesis of 2-Aminopurine-GNA/SNA Building Blocks

[chemical structure]

[0813] N-alkylation of 295 with acetonide-protected chloro compound gives 296. Subsequent base protection, acid treatment, and DMTr protection give 299. 300 and 301 can be synthesized as described above. Oxidative cleavage of diol in 298 followed by mild oxidation gives acid 302, which is coupled with 271 to give 2-aminopurine-SNA (serinol nucleic acid) precursor 303. 304 and 305 can be synthesized as described above.

### Synthesis of Xanthosine-UNA Building Blocks

[chemical structure]

[0814] Xanthosine 306 is acetylated to give 307. Double Mitsunobu reactions followed by alkali treatment and DMTr protection give 309. Standard producers for UNA analog synthesis described above can give xanthosine-UNA building blocks 312 and 313.

### Synthesis of Xanthosine-GNA Building Blocks

[chemical structure]

[0815] Acetylation of G-GNA gives 315 and following DMTr reaction for exocyclic amine gives 316. Mitsunobu reaction and acid treatment give 318. Treatment of 318 with sodium nitrite under acidic conditions gives 319. Mitsunobu reaction, removal of acetyl groups and DMTr protection give 322. 323 and 324 can be synthesized as described above.

### Synthesis of Xanthosine-SNA Building Blocks

[chemical structure]

[0816] Oxidative cleavage of diol in 321 followed by mild oxidation gives acid 325, which is coupled with 271 to give xanthosine-SNA (serinol nucleic acid) precursor 326. 327 and 328 can be synthesized as described above.

### Synthesis of N1-Methyl-G-UNA Building Blocks

[chemical structure]

[0817] Guanosine 329 is treated with Mel in DMSO to give 330. Exocyclic amino protection followed by DMTr reaction gives 332. Standard producers for UNA analog synthesis described above can give N1-methylG-UNA building blocks 335 and 336.

### Synthesis of N1-Methyl-G-GNA Building Blocks

[chemical structure]

[0818] Methylation of G-GNA gives 314. Protection of exocyclic amino group and 5′-hydroxyl group gives 339. Standard phosphitylation and succination followed by CPG loading give 340 and 341, respectively.

### Synthesis of N1-Methyl-G-SNA Building Blocks

[chemical structure]

[0819] Oxidative cleavage of diol in 338 followed by mild oxidation gives acid 342, which is coupled with 271 to give N1-methylG-SNA (serinol nucleic acid) precursor 343. 344 and 345 can be synthesized as described above.

### Synthesis of O6-Alkyl-UNA Building Blocks

[chemical structure]

[0820] Treatment of 346 with NaOMe followed by dmf protection gives 348. Subsequent DMTr reaction and following standard procedures for UNA analog synthesis described above can give O6-alkyl-G-UNA building blocks 352 and 353.

### Synthesis of O6-Alkyl-GNA/SNA Building Blocks

[chemical structure]

[0821] Protection of amino group in 354 gives 355. Standard phosphitylation and succination followed by CPG loading give 356 and 357, respectively. Acid treatment of 355 gives 358. Oxidative cleavage of diol in 358 followed by mild oxidation gives acid 359, which is coupled with 271 to give O6-alkylated G-SNA (serinol nucleic acid) precursor 360. 361 and 362 can be synthesized as described above.

### Example 4: Synthesis Hydroxyprolinol Based Nucleoside Amidites

[chemical structure]

[0822] Compound (101a)—Carboxylic acid (5.00 g, 27.1 mmol) and HBTU (10.27 g, 27.1 mmol) were taken in DMF (100 mL), cooled the reaction mixture in ice-water mixture under argon. DIEA (14.1 mL, 3 eq.) was added and stirred the solution for 5 minutes. A solution of compound 100 (13.18 g, 27.1 mmol) in DMF (50 mL) was added to the above mixture and stirred for 2 hours. TLC checked and the mixture was poured in to ice water mixture, precipitated compound was filtered and dried under vacuum. It was purified by silica gel chromatography (DCM/MeOH) to get compound 101a as an off white solid (12.20, 76%). ¹H NMR (400 MHz, DMSO-d6) δ 11.28 (d, J=17.8 Hz, 1H), 7.38-7.25 (m, 4H), 7.25-7.13 (m, 4H), 6.88 (dd, J=9.5, 2.6 Hz, 3H), 5.09 (d, J=4.1 Hz, 1H), 4.56 (d, J=16.7 Hz, 1H), 4.49-4.40 (m, 1H), 4.20-4.09 (m, 1H), 3.72 (d, J=2.6 Hz, 5H), 3.67 (dd, J=10.6, 5.3 Hz, 1H), 3.37 (dd, J=10.4, 4.0 Hz, 1H), 3.15 (dd, J=8.9, 5.3 Hz, 1H), 2.98 (dd, J=8.9, 3.2 Hz, 1H), 2.05-1.95 (m, 1H), 1.95-1.79 (m, 1H), 1.74 (d, J=1.1 Hz, 2H).

[0823] Compound (102a)—Compound 101a (4.0 g, 6.83 mmol) was added to a reaction flask, evacuated and purged with argon. The starting material was dissolved in acetonitrile, diisopropylamine (1.31 ml, 7.51 mmol), and 2-Cyanoethyl N,N,N′,N′-tetraisopropylphosphordiamidite (3.38 ml, 10.25 mmol) were added via syringe. A solution of 1H-tetrazole (16.7 mL, 7.51 mmol, 0.45M) was added and stirred at room temperature for 1 hour. The reaction was checked by TLC (50% EtOAc/Hex) and the reaction was concentrated under reduced pressure. The residue was dissolved in dichloromethane, added to separation funnel and organic layer was washed with saturated sodium bicarbonate solution. The organic layer was separated and washed with brine. The organic layer was separated and dried with sodium sulfate. The solid was filtered off and the mother liquor was concentrated. The residue was purified by flash chromatography on silica gel (20% to 100% EtOAc/Hex) and the product fractions combined and concentrated on reduced pressure to yield (4.96 g, 93%) of 102a. ¹H NMR (500 MHz, Acetonitrile-d3) δ 9.06 (s, 1H), 7.44-7.35 (m, 3H), 7.34-7.24 (m, 8H), 7.24-7.18 (m, 1H), 7.03 (t, J=1.5 Hz, 1H), 6.91-6.82 (m, 5H), 4.75 (m, 1H), 4.55-4.32 (m, 3H), 4.24 (m, 1H), 4.18-3.99 (m, 1H), 3.87 (dd, J=10.6, 5.8 Hz, 1H), 3.84-3.78 (m, 1H), 3.76 (s, 10H), 3.61 (m, 4H), 3.54-3.44 (m, 1H), 3.41-3.28 (m, 2H), 3.02 (m, 1H), 2.75 (t, J=5.9 Hz, 1H), 2.64 (m, 3H), 2.22-2.15 (m, 1H), 2.12-1.99 (m, 1H), 1.82 (d, J=1.2 Hz, 3H), 1.76 (d, J=1.2 Hz, 1H), 1.23 (t, J=6.8 Hz, 3H), 1.21-1.09 (m, 17H). ³¹P NMR (202 MHz, Acetonitrile-d3) δ 149.13, 148.63, 148.50, 148.30.

[0824] Compound (101b)—Carboxylic acid (5.00 g, 23.68 mmol) and HBTU (8.98 g, 23.68 mmol) were taken in DMF (100 mL), cooled the reaction mixture in ice-water mixture under argon. DIEA (12.36 mL, 3 eq.) was added and stirred the solution for 5 minutes. A solution of compound 100 (9.93 g, 23.68 mmol) in DMF (50 mL) was added to the above mixture and stirred for 2 hours. TLC checked and the mixture was poured in to ice water mixture, precipitated compound was filtered and dried under vacuum. It was purified by silica gel chromatography (DCM/MeOH) to get compound 101b as a pale yellow solid (13.1, 82%). ¹H NMR (400 MHz, DMSO-d6) δ 11.20 (s, 1H), 8.04-7.94 (m, 3H), 7.66-7.57 (m, 1H), 7.51 (t, J=7.6 Hz, 2H), 7.35-7.28 (m, 4H), 7.25 (d, J=8.8 Hz, 1H), 7.23-7.14 (m, 4H), 6.89 (m, 4H), 5.12 (d, J=4.1 Hz, 1H), 4.85-4.58 (m, 2H), 4.47 (m, 1H), 4.16 (m, 1H), 3.72 (d, J=2.6 Hz, 7H), 3.42 (dd, J=10.5, 3.9 Hz, 1H), 3.17 (dd, J=8.9, 5.3 Hz, 1H), 3.00 (dd, J=8.9, 3.1 Hz, 1H), 2.07-1.94 (m, 1H), 1.87 (m, 1H).

[0825] Compound (102b)—Compound 101b (2.0 g, 2.97 mmol) was added to a reaction flask, evacuated and purged with argon. The starting material was dissolved in acetonitrile, diisopropylamine (0.574 ml, 3.3 mmol), and 2-Cyanoethyl N,N,N′,N′-tetraisopropylphosphordiamidite (1.47 ml, 4.46 mmol) were added via syringe. A solution of 1H-tetrazole (7.33 mL, 3.3 mmol, 0.45M) was added and stirred at room temperature for 1 hour. The reaction was checked by TLC (70% EtOAc/Hex) and the reaction was concentrated under reduced pressure. The residue was dissolved in dichloromethane, added to separation funnel and organic layer was washed with saturated sodium bicarbonate solution. The organic layer was separated and washed with a brine solution. The organic layer was separated and dried with sodium sulfate. The solid was filtered off and the mother liquor was concentrated. The residue was purified by flash chromatography on silica gel (20% to 100% EtOAc/Hex) and the product fractions combined and concentrated on reduced pressure to yield (2.36 g, 91%) of 102b. ¹H NMR (500 MHz, Acetonitrile-d3) δ 9.10 (s, 1H), 7.96 (d, J=7.7 Hz, 1H), 7.73-7.66 (m, 1H), 7.67-7.60 (m, 1H), 7.56-7.48 (m, 2H), 7.43 (m, 1H), 7.41-7.37 (m, 1H), 7.35-7.30 (m, 2H), 7.30-7.25 (m, 3H), 7.25-7.18 (m, 1H), 6.87 (m, 3H), 4.85-4.69 (m, 1H), 4.68-4.50 (m, 1H), 4.24 (m, 1H), 3.90-3.79 (m, 1H), 3.76 (s, 5H), 3.71-3.53 (m, 2H), 3.53-3.41 (m, 1H), 3.40-3.28 (m, 1H), 3.03 (m, 1H), 2.65 (m, 1H), 2.23-2.15 (m, 1H), 2.08 (m, 1H), 1.23 (t, J=6.8 Hz, 3H), 1.21-1.14 (m, 8H). 31P NMR (202 MHz, Acetonitrile-d3) δ 149.13, 148.60, 148.50, 148.30.

[0826] Compound (101c)—Carboxylic acid (5.00 g, 16.82 mmol) and HBTU (6.37 g, 16.82 mmol) were taken in DMF (100 mL), cooled the reaction mixture in ice-water mixture under argon. DIEA (8.80 mL, 3 eq.) was added and stirred the solution for 5 minutes. A solution of compound 100 (7.05 g, 27.1 mmol) in DMF (50 mL) was added to the above mixture and stirred for 2 hours. TLC checked and the mixture was poured in to ice water mixture, precipitated compound was filtered and dried under vacuum. It was purified by silica gel chromatography (DCM/MeOH) to get compound 101c as a pale brown solid (9.30, 79%). ¹H NMR (400 MHz, DMSO-d6) δ 11.16 (s, 1H), 8.68 (s, 1H), 8.34 (s, 1H), 8.09-8.01 (m, 2H), 7.69-7.59 (m, 1H), 7.55 (dd, J=8.3, 6.9 Hz, 2H), 7.29 (m, 4H), 7.24-7.13 (m, 4H), 6.92-6.79 (m, 4H), 5.33-5.12 (m, 2H), 4.50 (t, J=4.8 Hz, 1H), 4.18 (q, J=4.0 Hz, 1H), 3.81 (dd, J=10.6, 5.2 Hz, 1H), 3.70 (dd, J=6.5, 1.7 Hz, 6H), 3.53 (m, 2H), 3.32 (m, 1H), 3.17 (m, 1H), 3.00 (dd, J=9.0, 3.2 Hz, 1H), 2.04 (m, 1H), 1.90 (m, 1H), 1.31-1.20 (m, 1H), 0.83 (m, 1H).

[0827] Compound (102c)—Compound 101c (2.0 g, 2.86 mmol) was added to a reaction flask, evacuated and purged with argon. The starting material was dissolved in acetonitrile, diisopropylamine (0.549 ml, 3.15 mmol), and 2-Cyanoethyl N,N,N′,N′-tetraisopropylphosphordiamidite (1.41 ml, 4.29 mmol) were added via syringe. A solution of 1H-tetrazole (7.0 mL, 3.15 mmol, 0.45M) was added and stirred at room temperature for 1 hour. The reaction was checked by TLC (100% EtOAc) and the reaction was concentrated under reduced pressure. The residue was dissolved in dichloromethane, added to separation funnel and organic layer was washed with saturated sodium bicarbonate solution. The organic layer was separated and washed with a brine solution. The organic layer was separated and dried with sodium sulfate. The solid was filtered off and the mother liquor was concentrated. The residue was purified by flash chromatography on silica gel (20% to 100% EtOAc/Hex) and the product fractions combined and concentrated on reduced pressure to yield (2.25 g, 90%) of 102c. 1H NMR (500 MHz, Acetonitrile-d3) δ 9.74 (s, 1H), 8.60 (d, J=32.4 Hz, 1H), 8.11 (d, J=3.4 Hz, 1H), 8.03 (d, J=7.6 Hz, 2H), 7.64 (t, J=7.5 Hz, 1H), 7.54 (t, J=7.6 Hz, 2H), 7.47-7.41 (m, 1H), 7.38 (m, 2H), 7.33 (m, 1H), 7.30-7.17 (m, 6H), 6.89-6.77 (m, 4H), 5.15-5.09 (m, 1H), 4.79 (m, 1H), 4.25 (dd, J=8.5, 4.6 Hz, 1H), 4.16-4.07 (m, 1H), 4.03 (m, 1H), 3.93 (dd, J=10.9, 5.1 Hz, 1H), 3.90-3.83 (m, 1H), 3.83-3.76 (m, 2H), 3.73 (dd, J=5.5, 2.0 Hz, 7H), 3.63 (m, 3H), 3.57-3.40 (m, 2H), 3.32 (s, 1H), 3.03 (m, 1H), 2.76 (t, J=5.9 Hz, 1H), 2.70 (t, J=5.9 Hz, 1H), 2.65 (m, 1H), 2.37 (dd, J=3.6, 1.8 Hz, 14H), 2.20 (m, 1H), 2.17-2.04 (m, 1H), 1.25-1.13 (m, 19H), 1.10 (d, J=6.7 Hz, 1H). 31P NMR (202 MHz, Acetonitrile-d3) δ 149.52, 149.14, 148.76, 148.67, 148.31.

[0828] Compound (101d)—Carboxylic acid (5.00 g, 17.91 mmol) and HBTU (6.79 g, 17.91 mmol) were taken in DMF (100 mL), cooled the reaction mixture in ice-water mixture under argon. DIEA (9.34 mL, 3 eq.) was added and stirred the solution for 5 minutes. A solution of compound 100 (7.51 g, 17.91 mmol) in DMF (50 mL) was added to the above mixture and stirred for 2 hours. TLC checked and the mixture was poured in to ice water mixture, precipitated compound was filtered and dried under vacuum. It was purified by silica gel chromatography (DCM/MeOH) to get compound 101d as an off white solid (8.10, 66%). ¹H NMR (400 MHz, DMSO-d6) δ 12.05 (s, 1H), 11.65 (s, 1H), 7.83 (s, 1H), 7.34-7.26 (m, 4H), 7.26-7.20 (m, 1H), 7.20-7.14 (m, 4H), 6.85 (m, 4H), 5.18 (d, J=3.8 Hz, 1H), 5.05-4.96 (m, 1H), 4.91 (d, J=17.1 Hz, 1H), 4.44 (m, 1H), 4.14 (m, 1H), 3.70 (d, J=1.3 Hz, 5H), 3.68 (s, 1H), 3.63 (dd, J=10.7, 4.9 Hz, 1H), 3.44 (dd, J=10.6, 3.3 Hz, 1H), 3.20-3.09 (m, 1H), 3.03 (dd, J=8.8, 6.0 Hz, 1H), 2.79-2.64 (m, 1H), 2.04 (m, 1H), 1.93 (m, 1H), 1.09 (m, 6H).

[0829] Compound (102d)—Compound 101d (1.4 g, 2.06 mmol) was added to a reaction flask, evacuated and purged with argon. The starting material was dissolved in dichloromethane, diisopropylamine (0.4 ml, 2.3 mmol), and 2-Cyanoethyl N,N,N′,N′-tetraisopropylphosphordiamidite (1.02 ml, 3.09 mmol) were added via syringe. A solution of 1H-tetrazole (5.11 mL, 2.3 mmol, 0.45M) was added and the reaction stirred at room temperature for 1 hour. The reaction was checked by TLC (70% EtOAc/Hex) and the reaction was concentrated under reduced pressure. The residue was dissolved in dichloromethane, added to separation funnel and organic layer was washed with saturated sodium bicarbonate solution. The organic layer was separated and washed with a brine solution. The organic layer was separated and dried with sodium sulfate. The solid was filtered off and the mother liquor was concentrated. The residue was purified by flash chromatography on silica gel (40% to 100% EtOAc/Hex) and the product fractions combined and concentrated on reduced pressure to yield (1.45 g, 80%) of 102d. 1H NMR (500 MHz, Acetonitrile-d3) δ 12.00 (s, 1H), 10.10 (s, 1H), 7.65 (d, J=1.5 Hz, 1H), 7.44 (dd, J=16.1, 6.9 Hz, 1H), 7.38 (dd, J=7.5, 1.8 Hz, 2H), 7.34-7.28 (m, 2H), 7.26 (m, 6H), 7.21 (m, 1H), 6.83 (m, 5H), 4.93-4.80 (m, 2H), 4.80-4.72 (m, 1H), 4.72-4.53 (m, 1H), 4.32-4.20 (m, 1H), 4.14-3.94 (m, 1H), 3.88 (m, 1H), 3.80 (m, 2H), 3.76-3.70 (m, 9H), 3.61 (m, 4H), 3.49 (d, J=18.4 Hz, 1H), 3.31 (m, 1H), 3.06 (m, 1H), 2.76 (t, J=5.9 Hz, 1H), 2.72-2.61 (m, 3H), 2.57-2.45 (m, 2H), 2.43-2.31 (m, 21H), 2.25-2.03 (m, 3H), 1.22 (t, J=6.8 Hz, 5H), 1.17 (m, 16H), 1.07 (dd, J=23.6, 6.8 Hz, 7H). 31P NMR (202 MHz, Acetonitrile-d3) δ 149.25, 149.01, 148.80, 148.22.

### Example 5

[0830] Oligonucleotide Synthesis and Purification: All oligonucleotides were prepared on a MerMade 192 synthesizer on a 1 μmole scale using universal or custom supports. All phosphoramidites were used at a concentration 100 mM in 100% Acetonitrile or 9:1 Acetonitrile:DMF with a standard protocol for 2-cyanoethyl phosphoramidites, except that the coupling time was extended to 400 seconds. Oxidation of the newly formed linkages was achieved using a solution of 50 mM I2 in 9:1 Acetonitrile:Water to create phosphate linkages and 100 mM DDTT in 9:1 Pyridine:Acetonitrile to create phosphorothioate linkages. After the trityl-off synthesis, columns were incubated with 150 μL of 40% aqueous Methylamine for 45 minutes and the solution drained via vacuum into a 96-well plate. After repeating the incubation and draining with a fresh portion of aqueous Methylamine, the plate containing crude oligonucleotide solution was sealed and shaken at room temperature for an additional 60 minutes to completely remove all protecting groups. Precipitation of the crude oligonucleotides was accomplished via the addition of 1.2 mL of 9:1 Acetonitrile:EtOH to each well followed by incubation at −20° C. overnight. The plate was then centrifuged at 3000 RPM for 45 minutes, the supernatant removed from each well, and the pellets resuspended in 950 μL of 20 mM aqueous NaOAc. Each crude solution was finally desalted over a GE Hi-Trap Desalting Column (Sephadex G25 Superfine) using water to elute the final oligonucleotide products. All identities and purities were confirmed using ESI-MS and IEX HPLC, respectively.

[0831] Temperature-dependent UV Spectroscopy: The melting studies were performed at a duplex concentration of 1 μM (consisting of the modified antisense strand paired with the complementary modified sense strand) in 0.10×PBS (1.0 mM Na/K phosphate buffer, pH 7.4, with 13.7 mM NaCl and 0.3 mM KCl) in 1 cm path length quartz cells on a Cary 300 spectrophotometer equipped with a thermoprogrammer. Each cuvette contained 800 μL of sample solution covered by 200 μL of light mineral oil. Melting curves were monitored at 260 nm with a heating rate of 1° C./min from 15-90° C. Melting temperatures (Tm) were calculated from the first derivatives of the smoothed heating curves and the reported values are the result of at least two independent measurements.

### In Vitro Activity Studies

[0832] Cell culture and transfections: Primary Mouse Hepatocytes (Thermo Fisher Scientific/Gibco) were transfected by adding 4.9 μL of Opti-MEM plus 0.1 μL of Lipofectamine RNAiMax per well (Invitrogen, cat #13778-150) to 5 μL of siRNA duplexes per well into a 384-well plate and incubated at room temperature for 15 minutes. 40 μL of Dulbecco's Modified Eagle Medium (Hep3b) or William's Medium (PMH) containing ˜5 ×103 cells were then added to the siRNA mixture. Cells were incubated for 24 hours at 37° C. and then processed for RNA purification. Experiments were performed at 10 nM and 0.1 nM doses of siRNA.

[0833] Total RNA isolation using DYNABEADS mRNA Isolation Kit: RNA was isolated using an automated protocol on a BioTek-EL406 platform using DYNABEADs (Invitrogen, cat #61012). Briefly, 70 μL of Lysis/Binding Buffer and 10 μL of lysis buffer containing 3 μL of magnetic beads were added to each well. Plates were incubated on an electromagnetic shaker for 10 minutes at room temperature and then magnetic beads were captured and the supernatant was removed. Bead-bound RNA was then washed 2 times with 150 μL Wash Buffer A and once with Wash Buffer B. Beads were then washed with 150 μL Elution Buffer, re-captured and supernatant removed.

[0834] cDNA synthesis using ABI High capacity cDNA reverse transcription kit (Applied Biosystems, cat #4368813): 12 μL of a master mix containing 1.2 μL 10× Buffer, 0.48 μL 25× dNTPs, 1.2 μL 10× Random primers, 0.6 μL Reverse Transcriptase, 0.6 μL RNase inhibitor and 7.92 μL of H₂O per reaction was added to RNA isolated above. Plates were sealed, mixed, and incubated on an electromagnetic shaker for 10 minutes at room temperature, followed by 2 h 37° C.

[0835] Real time PCR: 2 μL of cDNA were added to a master mix containing 2 μL water, 0.5 μL of either an appropriate GAPDH TaqMan VIC Probe or the target probe and 5 μL Lightcycler 480 probe master mix (Roche, cat #04887301001) per well in a 384 well plate (Roche, cat #04887301001). Real time PCR was done in a LightCycler480 Real Time PCR system (Roche). Each duplex was tested in quadruplicate and data were normalized to cells transfected with a non-targeting control siRNA. To calculate relative fold change, real time data were analyzed using the ΔΔCt method and normalized to assays performed with cells transfected with a non-targeting control siRNA.

### In Vitro Reporter Assays

[0836] Dual-Glo® Luciferase assay: Cos7 cells (ATCC, Manassas, VA) were grown to near confluence at 37° C. in an atmosphere of 5% CO2 in DMEM (ATCC) supplemented with 10% FBS, before being released from the plate by trypsinization. siRNA and psiCHCECK2 plasmid transfection was carried out by adding 5 μL of siRNA duplexes and 5 μL of psiCHECK2 plasmid per well along with 5 μL of Opti-MEM plus 0.1 μL of Lipofectamine 2000 per well (Invitrogen, Carlsbad CA. cat #13778-150) and then incubated at room temperature for 15 minutes. The mixture was then added to the cells which were re-suspended in 35 ul of fresh complete media. The transfected cells were incubated at 37° C. in an atmosphere of 5% CO2.

[0837] 48 hours after the siRNAs and psiCHECK2 plasmid were transfected; Firefly (transfection control) and Renilla (fused to target sequence) luciferase were measured. First, media was removed from cells. Then Firefly luciferase activity was measured by adding 20 μL of Dual-Glo® Luciferase Reagent equal to the culture medium volume to each well and mix. The mixture was incubated at room temperature for 30 minutes before luminescence (500 nm) was measured on a Spectramax (Molecular Devices) to detect the Firefly luciferase signal. Renilla luciferase activity was measured by adding 20 μL of room temperature of Dual-Glo® Stop & Glo® Reagent was added to each well and the plates were incubated for 10-15 minutes before luminescence was again measured to determine the Renilla luciferase signal. The Dual-Glo® Stop & Glo® Reagent, quenches the firefly luciferase signal and sustained luminescence for the Renilla luciferase reaction. siRNA activity was determined by normalizing the Renilla signal to the Firefly (control) signal within each well. The magnitude of siRNA activity was then assessed relative to cells that were transfected with the same vector but were not treated with siRNA or were treated with a non-targeting siRNA. All transfections were done at n=2 or greater.

### In Vivo Mouse and Rat Studies

[0838] All studies were conducted using protocols consistent with local, state and federal regulations as applicable and approved by the Institutional Animal Care and Use Committees (IACUCs) at Alnylam Pharmaceuticals.

[0839] In mouse pharmacodynamic studies, female C57BL/6 mice (Charles River Laboratories) were administered a single dose of a vehicle control (1×PBS or 0.9% sodium chloride) or siRNA subcutaneously in the upper back. Bleeds were collected by retro-orbital bleeding. Serum were separated by centrifuging at 13000 rpm at room temperature for 10 mins. Mouse livers were collected and immediately snap frozen in liquid nitrogen, and stored at −80° C. for mRNA and siRNA analysis.

mRNA and siRNA Quantitation

[0840] RNA was extracted with the miRNeasy Kit (Qiagen) according to manufacturer's instructions, converted to cDNA with the High-Capacity cDNA Reverse Transcription Kit (Thermo Fisher Scientific) according to manufacturer's instructions, and mRNA levels were assessed by quantitative polymerase chain reaction (qPCR) using gene-specific Taqman probes (Thermo Fisher Scientific) on Roche Light Cycler 480 II using LightCycler 480 Probes Master (Roche).

[0841] To quantitate exposure to siRNAs, cell pellets were resuspended in phosphate-buffer saline (PBS) containing 0.25% Triton X-100, heated at 95° C. for 10 min, centrifuged at 14,000 rpm at 4° C. for 10 min, and reverse transcription was performed on the supernatants using TaqMan MicroRNA Reverse Transcription Kit (Thermo Fisher Scientific) according to the manufacturer's instructions. qPCR was performed on Roche Light Cycler 480 II using LightCycler 480 Probes Master (Roche) according to the manufacturer's instructions.

### Results

### In Vitro Activity

[0842] In vitro activity: Results of in vitro activity assays are summarized in Table 1. As the data shows, glycolic nucleic acid (GNA) modifications using isoC or isoG in the seed region of the antisense strand preserves the on-target activity more effectively than GNA-C or GNA-G. Methyl UNA (mUNA) and 2′-5′-RNA modifications also preserve on-target activity relative to the parent when incorporated at various positions in the seed region from antisense 5-8.

TABLE 1
In vitro activity data for various thermally destabilizing modifications in primary mouse hepatocytes.

| | Position 5 | | | | | | | | Position 6 | | | | | | | |
|---|---|---|---|---|---|---|---|---|---|---|---|---|---|---|---|---|
| | Seq 1 | | Seq 2 | | Seq 3 | | Seq 4 | | Seq 1 | | Seq 2 | | Seq 3 | | Seq 4 | |
| | On- | On- | On- | On- | On- | On- | On- | On- | On- | On- | On- | On- | On- | On- | On- | On- |
| | target | target | target | target | target | target | target | target | target | target | target | target | target | target | target | target |
| Modification | TX | FU | TX | FU | TX | FU | TX | FU | TX | FU | TX | FU | TX | FU | TX | FU |
| Mod 1 (S) | 0.29 | 1.15 | | | | | | | | | | | | | | |
| Mod 2 (S) | −0.35 | 0.36 | | | | | | | | | | | | | | |
| Mod 3 (S) | | | | | | | | | | | −0.70 | −1.07 | | | | |
| Mod 4 (S) | | | | | | | | | | | −1.08 | −1.49 | | | | |
| Mod 5 (R) | | | | | 0.45 | −0.16 | | | | | | | | | | |
| Mod 5 (S) | | | | | −0.03 | −0.87 | | | | | | | | | | |
| Mod 6 (R) | | | | | −0.28 | −0.78 | | | | | | | | | | |
| Mod 6 (S) | | | | | 0.18 | −0.38 | | | | | | | | | | |
| Mod 7 (R) | | | | | 0.50 | 0.02 | | | | | | | | | | |
| Mod 7 (S) | | | | | 0.43 | −0.10 | | | | | | | | | | |
| Mod 8 | −0.15 | | −0.20 | | | | | | 0.54 | | −0.06 | | | | | |
| UNA | | | | | −0.21 | −1.14 | | | | | | | | | | |
| | Position 7 | | | | | | | | Position 8 | | | | | | | |
| | Seq 1 | | Seq 2 | | Seq 3 | | Seq 4 | | Seq 1 | | Seq 2 | | Seq 3 | | Seq 4 | |
| | On- | On- | On- | On- | On- | On- | On- | On- | On- | On- | On- | On- | On- | On- | On- | On- |
| | target | target | target | target | target | target | target | target | target | target | target | target | target | target | target | target |
| Modification | TX | FU | TX | FU | TX | FU | TX | FU | TX | FU | TX | FU | TX | FU | TX | FU |
| Mod 1 (S) | | | | | | | | | | | | | | | | |
| Mod 2 (S) | | | | | | | | | | | | | | | | |
| Mod 3 (S) | | | | | | | | | | | | | | | | |
| Mod 4 (S) | | | | | | | | | | | | | | | | |
| Mod 5 (R) | | | | | 0.50 | −0.03 | −1.26 | −0.33 | | | | | | | | |
| Mod 5 (S) | | | | | −0.04 | −1.20 | −0.97 | 0.22 | | | | | | | | |
| Mod 6 (R) | | | | | 0.67 | −0.32 | −0.98 | 0.36 | | | | | | | | |
| Mod 6 (S) | | | | | 0.06 | −0.53 | −0.31 | −0.09 | | | | | | | | |
| Mod 7 (R) | | | | | 0.15 | −0.35 | −0.99 | −0.24 | | | | | | | | |
| Mod 7 (S) | | | | | 0.72 | −0.02 | −0.79 | −0.14 | | | | | | | | |
| Mod 8 | −0.17 | | 0.34 | | | | | | 0.94 | | 0.71 | | | | | |
| UNA | | | | | 0.40 | −0.56 | −1.25 | −0.66 | | | | | | | | |

All values are log2 transformed and relative to the parent; TX = as measured by transfection (10 nM final duplex concentration), FU = as measured by free uptake (1 nM final duplex concentration). Modifications are as specified in FIG. x. Values for the parents are as follows (percent of target remaining): Seq 1 (GO1), On-target Tx 0.44 ± 0.06%, On-target FU 22.39 ± 5.76%; Seq 2 (TTR), On-target Tx 2.92 ± 1.87%, On-target FU 25.19 ± 7.65%; Seq 3 (TTR), On-target Tx 1.19 ± 0.07%, On-target FU 25.89 ± 3.32%.

### In Vitro Reporter Assays

[0843] Results of off-target reporter assays are summarized in Table 2.

TABLE 2
In vitro reporter assays for antisense strand modified duplexes.

| | | On-Target mRNA | | Off-target |
|---|---|---|---|---|
| | | remaining (%) | | IC₅₀ |
| | | 10 nM siRNA | 0.1 nM siRNA | (nM) |
| TTR | Parent (AD-64958) | 2.3 | 25.5 | 0.05 |
| (Seq 2) | 2′-5′-RNA @ AS5 | 2.0 | 24.6 | 0.47 |
| | 2′-5′-RNA @ AS6 | 2.2 | 30.5 | 0.02 |
| | 2′-5′-RNA @ AS7 | 2.9 | 31.1 | 11.08 |
| | 2′-5′-RNA @ AS8 | 3.7 | 31.5 | 0.21 |
| | (S)-isoG-GNA @ AS6 | 0.8 | 11.6 | 0.55 |
| HAO1 | Parent (AD-65644) | 27.7 | 96.1 | 0.53 |
| (Seq 1) | 2′-5′-RNA @ AS5 | 24.9 | 104.4 | 1.03 |
| | 2′-5′-RNA @ AS6 | 40.1 | 98.5 | 2.55 |
| | 2′-5′-RNA @ AS7 | 24.7 | 80.2 | >10 |
| | 2′-5′-RNA @ AS8 | 53.0 | 95.1 | 1.28 |
| | (S)-isoC-GNA @ AS5 | | | >50 |

On-target activity measured in primary mouse hepatocytes via transfection at the indicated concentrations. Off-target IC50s measured using luciferase reporter plasmids which were co-transfected with siRNAs into COS-7 cells.

### Temperature-Dependent UV Spectroscopy

[0844] Results of temperature-dependent UV spectroscopy are summarized in Table 3.

TABLE 3
Thermal melting temperatures (Tm) of some exemplary modified dsRNAs.

| | Position 5 | | | | Position 6 | | | | Position 7 | | | |
|---|---|---|---|---|---|---|---|---|---|---|---|---|
| Modification | Seq 1 | Seq 2 | Seq 3 | Seq 4 | Seq 1 | Seq 2 | Seq 3 | Seq 4 | Seq 1 | Seq 2 | Seq 3 | Seq 4 |
| Mod 1 (S) | 61.8 | | | | | | | | | | | |
| Mod 2 (S) | 64.0 | | | | | | | | | | | |
| Mod 3 (S) | | | | | | 59.0 | | | | | | |
| Mod 4 (S) | | | | | | 62.3 | | | | | | |
| Mod 5 (R) | | | 84.2 | | | | | | | | 80.3 | 82.0 |
| Mod 5 (S) | | | 84.2 | | | | | | | | 80.3 | 82.0 |
| Mod 6 (R) | | | 84.1 | | | | | | | | 81.2 | 82.0 |
| Mod 6 (S) | | | 84.0 | | | | | | | | 81.1 | 82.0 |
| Mod 7 (R) | | | 84.0 | | | | | | | | 80.0 | 82.1 |
| Mod 7 (S) | | | 84.3 | | | | | | | | 80.0 | 83.0 |
| Mod 8 | 64.0 | 62.5 | | | 62.0 | 61.0 | | | 63.5 | 61.5 | | |
| UNA | | | 84.1 | | | | | | | | 80.1 | 82.0 |

Modifications are as specified in FIG. 1. Values for the parent duplexes are as follows: Seq 1 (GO1) 66.8° C.; Seq 2 (TTR) 66.3° C. (measured at 1 μM duplex concentration in 1x PBS); and Seq 3 (TTR) 87.3° C., Seq 4 (TTR) 89.0° C. (measured at 1 μM duplex concentration in 0.25x PBS)

### Mouse Pharmacodynamic Data

[0845] Results of in vivo studies are summarized in Table 4. GNA-isoC or mUNA modifications preserve potency in vivo.

TABLE 4
GNA-isoC and GNA-isoG preserve potency more effectively than GNA-C and GNA-G, respectively, in vivo. Methyl-
UNA modifications also preserve activity relative to the parent at antisense position 7. Mice were administered
a single dose of siRNAs at 1 mg/kg and liver mRNA or protein knockdown was assessed at Day 7.

| | Position 5 | | | | | | | | Position 6 | | | | | | | |
|---|---|---|---|---|---|---|---|---|---|---|---|---|---|---|---|---|
| | Seq 1 | | Seq 2 | | Seq 3 | | Seq 4 | | Seq 1 | | Seq 2 | | Seq 3 | | Seq 4 | |
| | On- | St. | On- | St. | On- | St. | On- | St. | On- | St. | On- | St. | On- | St. | On- | St. |
| Modification | target | Dev. | target | Dev. | target | Dev. | target | Dev. | target | Dev. | target | Dev. | target | Dev. | target | Dev. |
| Mod 1 (S) | 0.58 | 0.14 | | | | | | | | | | | | | | |
| Mod 2 (S) | 0.24 | 0.02 | | | | | | | | | | | | | | |
| Mod 3 (S) | | | | | | | 0.25 | 0.08 | | | 0.42 | 0.25 | | | 0.47 | 0.13 |
| Mod 4 (S) | | | | | | | 0.25 | 0.03 | | | 0.24 | 0.04 | | | 0.47 | 0.05 |
| Mod 5 (R) | | | | | | | | | | | | | | | | |
| Mod 5 (S) | | | | | | | | | | | | | | | | |
| Mod 6 (R) | | | | | | | | | | | | | | | | |
| Mod 6 (S) | | | | | | | | | | | | | | | | |
| Mod 7 (R) | | | | | | | | | | | | | | | | |
| Mod 7 (S) | | | | | | | | | | | | | | | | |
| Mod 8 | 0.21 | 0.07 | 0.28 | 0.04 | | | | | 0.25 | 0.02 | 0.27 | 0.06 | | | | |
| UNA | | | | | | | | | | | | | | | | |
| | Position 7 | | | | | | | | Position 8 | | | | | | | |
| | Seq 1 | | Seq 2 | | Seq 3 | | Seq 4 | | Seq 1 | | Seq 2 | | Seq 3 | | Seq 4 | |
| | On- | St. | On- | St. | On- | St. | On- | St. | On- | St. | On- | St. | On- | St. | On- | St. |
| Modification | target | Dev. | target | Dev. | target | Dev. | target | Dev. | target | Dev. | target | Dev. | target | Dev. | target | Dev. |
| Mod 1 (S) | | | | | | | | | | | | | | | | |
| Mod 2 (S) | | | | | | | | | | | | | | | | |
| Mod 3 (S) | | | | | | | | | | | | | | | | |
| Mod 4 (S) | | | | | | | | | | | | | | | | |
| Mod 5 (R) | | | | | 0.17 | 0.02 | 0.16 | 0.03 | | | | | | | | |
| Mod 5 (S) | | | | | 0.17 | 0.03 | 0.16 | 0.03 | | | | | | | | |
| Mod 6 (R) | | | | | 0.20 | 0.07 | 0.29 | 0.02 | | | | | | | | |
| Mod 6 (S) | | | | | 0.20 | 0.03 | 0.23 | 0.03 | | | | | | | | |
| Mod 7 (R) | | | | | 0.18 | 0.05 | 0.14 | 0.02 | | | | | | | | |
| Mod 7 (S) | | | | | 0.15 | 0.04 | 0.20 | 0.02 | | | | | | | | |
| Mod 8 | 0.17 | 0.06 | 0.20 | 0.02 | | | | | 0.43 | 0.10 | 0.24 | 0.06 | | | | |
| UNA | | | | | 0.14 | 0.03 | 0.22 | 0.05 | | | | | | | | |

Values represent the level of mRNA (Seq 1, GO1) or protein (Seqs 2-3, TTR) remaining with respect to PBS control at day 7 post-dose in the liver or circulation, respectively. Parent knockdown at the specified dose was as follows: 0.129 ± 0.028 for Seq 1 (GO1); 0.19 ± 0.03 for Seq 2 (TTR); 0.123 ± 0.036 for Seq 3 (TTR); 0.215 ± 0.015 for Seq 4 (TTR). All values represent the results from a single experiment with an n = 3 animals unless otherwise indicated. Modifications are as specified in FIG. 1.

TABLE 5
Sequences of exemplary siRNAs (Table 5 discloses SEQ ID NOS 10-17, respectively,
in order of columns)

| siRNA duplex | Passenger (5′-3′) | Guide (5′-3′) | target |
|---|---|---|---|
| AD-65644 (Seq 1) | g•a•auguGaaAGucaucgacaa(L) | u•U•gucGaUGacuuUcAcauuc•u•g | GO1 |
| AD-64958 (Seq 2) | a•a•caguGuUCUugcucuauaa(L) | u•U•auaGagcaagaAcAcuguu•u•u | TTR |
| AD-125762 (Seq 3) | a•g•uguuCuUGCucuauaaaca(L) | u•G•uuuauagagcaAgAacacu•g•u | TTR |
| AD-125773 (Seq 4) | u•u•cuugCuCUAuaaaccgugu(L) | a•C•acgguuuauagAgCaagaa•c•a | TTR |

Uppercase and lower-case letters represent 2′-F and 2′-OMe, respectively, to Adenosine, Cytosine, Guanosine, and Uridine. (L) represents the tri-N-acetylgalactosamine ligand. Phosphorothioate linkages are indicated by the “•” symbol.

TABLE 6
GNA-isoC and GNA-isoG improve or maintain potency in vivo relative to GNA-C and GNA-G,
respectively. (Table 6 discloses SEQ ID NOS 18-27, respectively, in order of appearance)

| | | Parent KD (rel. | (S)-GNA KD (rel. | (S)-isoGNA KD |
|---|---|---|---|---|
| Sequence | siRNA Duplex | to pre-bleed) | to pre-bleed) | (rel. to pre-bleed) |
| 5 | a•g•gaucUuGCCaaagcaguaa(L) | 0.49 ± 0.13 | 0.46 ± 0.13 | 0.38 ± 0.03 |
| | u•U•acugcuuuggcAaGauccu•g•g | | 0.33 ± 0.03 | 0.40 ± 0.18 |
| | a•g•gaucUuGCCaaagcaguaa(L) | | | |
| | u•U•acugcuuuggcAaGauccu•g•g | | | |
| 6 | g•a•ccagGaUCUugccaaagca(L) | 0.53 ± 0.01 | 0.02 ± 0.01 | 0.08 ± 0.03 |
| | u•G•cuuuggcaagaUcCugguc•c•u | | | |
| 7 | u•g•cuuuGaGCCucagcuucua(L) | 0.16 ± 0.03 | 0.43 ± 0.06 | 0.29 ± 0.03 |
| | u•A•gaagcugaggcUcAaagca•c•u | | | |
| 8 | g•g•agccCaAGAaagugaaaga(L) | 0.71 ± 0.05 | 0.92 ± 0.11 | 0.78 ± 0.07 |
| | u•C•uuucacuuucuUgGgcucc•a•c | | | |

Uppercase and lower-case letters represent 2′-F and 2′-OMe, respectively, to Adenosine, Cytosine, Guanosine, and Uridine. (L) represents the tri-N-acetylgalactosamine ligand. Phosphorothioate linkages are indicated by the “•” symbol. Bold and underlined letters represent the nucleotide which was replaced by (S)-GNA (Mod 1 or 3) or by (S)-isoGNA (Mod 2 or 4). Mice were administered a single dose of siRNAs at 1 mg/kg (Seqs 5 and 7) or 3 mg/kg (Seqs 6 and 8) and liver protein knockdown was assessed at Day 7.

### Example 6: Copper Free Click Linked Bis-RNAi

[0846] An exemplary approach for preparing Bis-RNAi using a copper free “click” conjugation is shown with reference to FIG. 10. As shown, two individually synthesized strands having an azide functional group at a 3′ or 5′ end can be coupled to a strand functionalized with DBCO. In the approach nucleotide linker design (e.g., 2′-F triplet) can easily be incorporated. The method allows for 3′-5′ linked or 5′-5′ linked designs. This approach also allows preparation of each sense strand separately avoiding lower yields and difficult impurities encountered with longmer strands are made by conventional methods.

### Longmer Conjugation Synthesis:

[0847] Three different linkers, Q327, Q328 and Q324 were constructed all using strain promoted azide-cyclooctyne additions. Schemes 31, 32 and 33 show the preparation of these linkers. In each case the 5′ end of the F7 sense strand was functionalized with a dibenzylcyclooctyne moiety (DBCO) and either the 3′ or 5′ end of the TTR sense strand was functionalized with an azide. To “click” the strands together, equimolar amounts of each strand (0.45 M in water) and 30% 0.2 M phosphate buffer (pH 7.1) were mixed for 12 hrs at R.T. The crude ligand-conjugated and unconjugated oligonucleotides were purified by anion-exchange high-performance liquid chromatography (IEX-HPLC) with TSK-Gel Super Q-5PW support (TOSOH Corp.) using a linear gradient of 30-62% buffer B over 130 min with 50 mL/min flow rate (Buffer A: 0.02 M Na2HPO4 in 10% CH₃CN, pH 11 and buffer B: buffer A plus 1 M NaBr). The longmers were desalted by size exclusion chromatography on an AKTA Prime chromatography system using an AP-2 glass column (20×300 mm, Waters) custom-packed with Sephadex G25 (GE Healthcare), eluted with sterile nuclease-free water.

[0848] FIG. 47 lists some exemplary Bis-RNAi conjugates using the copper free “click” conjugation linkers Q327, Q328 and Q324. Table 7 summarizes some information regarding these conjugates.

[chemical structure]

[chemical structure]

[chemical structure]

TABLE 7
Bis-RNAi conjugates

| Strand/Multiplex | | Connection | Calculated | Observed |
|---|---|---|---|---|
| ID | Linker | Type | Mass | Mass |
| AM-163 | Q327 | 5′-3′ | 16416.85 | 16414.25 |
| AM-164 | Q328 | 5′-5′ | 16088.45 | 16086.58 |
| AM-165 | Q327 | 5′-3′ | 17765.76 | 17763.06 |
| AM-166 | Q324 | 5′-3′ | 18037.04 | 18035.11 |

[0849] General Oligonucleotide Synthesis:_FVII and mTTR siRNA sequences were synthesized at 1 μmol scale on an Applied Biosystems ABI 394 using the solid support mediated phosphoramidite chemistry. The solid support was controlled pore glass (500 Å) loaded with custom GalNAc ligand, custom L8 (amine group), or 2′ OMe RNA functionalized support. Ancillary synthesis reagents, 2′-F and 2′-O-Methyl RNA and deoxy phosphoramidites were obtained from Thermo-Fisher (Milwaukee, WI) and Hongene (China). Custom Q8, Q300 bromohexyl (Glen Research), and Q187 DBCO-TEG (Glen Research) were introduced as the corresponding phosphoramidites. Synthesis of 3′ GalNAc conjugated single strands were performed on a GalNAc modified CPG support. Custom CPG universal solid support was used for the synthesis of antisense single strands. Coupling time for all phosphoramidites (0.15 M in acetonitrile) was 10 min employing 5-Ethylthio-1H-tetrazole (ETT) as activator (0.25 M in acetonitrile). Phosphorothioate linkages were generated using a 0.09 M solution of 3-((Dimethylamino-methylidene) amino)-3H-1, 2, 4-dithiazole-3-thione (DDTT, (AM Chemicals, CA, USA) in pyridine. Oxidation time was 3 minutes. All sequences were synthesized with final removal of the DMT group (“DMT off’).

[0850] Upon completion of the solid phase synthesis, oligoribonucleotides were cleaved from the solid support and deprotected in 5% diethylamine 95% aq. ammonia for 16 hrs at 35° C. The crude ligand-conjugated and unconjugated oligonucleotides were purified by anion-exchange high-performance liquid chromatography (IEX-HPLC) with TSK-Gel Super Q-5PW support (TOSOH Corp.) using a linear gradient of 22-42% buffer B over 130 min with 50 mL/min flow rate (Buffer A: 0.02 M Na2HPO4 in 10% CH3CN, pH 8.5 and buffer B: buffer A plus 1 M NaBr). All single strands were purified to >85% HPLC (260 nm) purity and then desalted by size exclusion chromatography on an AKTA Prime chromatography system using an AP-2 glass column (20×300 mm, Waters) custom-packed with Sephadex G25 (GE Healthcare), eluted with sterile nuclease-free water.

[0851] The azides were installed via NHS ester post-synthetic conjugation (Click Chemistry Tools) or on-resin conversion from the 5′ hexylbromo phosphoramidite. For the bromohexyl conversion, the support was washed with acetonitrile and dried under vacuum. The support was transferred to a tube and NaN₃ was added in DMF. The support was heated to 65° C. for 1.3 hr and washed three times with DMF and 3 times with DCM before cleaving under standard conditions. The non-amidite DBCO modifications were installed via NHS ester post-synthetic conjugation (Click chemistry tools). Both azide and DBCO NHS conjugations were performed in a 50/50 acetonitrile 0.2 M phosphate buffer (pH 11) v/v solution for 3 hr.

[0852] Annealing:_For the multiplex constructs composed of 3 and less single strands, annealing of FVII and mTTR single strands was performed by mixing equimolar mixture of sense and antisense single strands. After combining the complementary single strands, the mixture was lyophilized to dryness. The powder was then reconstituted in 1×PBS buffer. In all cases, non-denaturing IEX-HPLC methods showed the presence of a single chromatogram peak, corresponding to the single entity multiplex construct.

[0853] In vivo Studies: All animals were held in a pathogen-free environment, and all procedures involving animals were performed in accordance with local, state, and federal regulations as applicable and approved by the Institutional Animal Care and Use Committee (IACUC). Female C57BL/6 mice (7-8 weeks old) were obtained from Charles River Labs. The Bis-siRNA compounds (targeting FVII and TTR) were diluted to the appropriate concentrations in sterile PBS. Mice received either PBS or Bis-siRNA compounds via subcutaneous (s.c.) injection at a volume of 10 mL/kg on Day 0. Blood samples were collected from animals by retro-orbital bleed at various time points (Day 0 [pre-dose], 7, 14, 21, and 28) and processed to serum (Microtainer Serum Separator Tubes; Becton Dickinson, Franklin Lakes, NJ, USA). Serum levels of Factor VII protein were determined by using an activity-based chromogenic assay (Biophen FVII, Aniara Corporation, Mason, OH). Serum levels of TTR protein were determined using a mouse TTR ELISA. Table 8 summarizes the experiment design.

TABLE 8
Mouse PD Study Design; sugars and “click” linkers

| | Test | | No. of | Time | Dose |
|---|---|---|---|---|---|
| Group # | Article | Linker | animals | Points | (mg/kg) |
| 1 | PBS | — | 3 | Day 0, 7, | — |
| 2 | 1:1 Mixture | — | | 14, 21, 28 | 1 + 1 mg/kg |
| 3 | AM-133 | 3X Q113: Galactose-C5 | | | 2 mg/kg |
| 4 | AM-137 | 3X Q115: Glucose-C5 | | | |
| 5 | AM-141 | 3X Q117: NAc | | | |
| | | Glucosamine-C5 | | | |
| 6 | AM-142 | 2X Q304: GalNAc-C5 | | | |
| 7 | AM-143 | 3X Q304: GalNAc-C5 | | | |
| 8 | AM-147 | 3X Q306: Manose-C5 | | | |
| 9* | AM-163 | Q327GfAfUf: 5′-3′ 19 mers (4PS) | | | |
| 10* | AM-164 | Q328GfAfUf: 5′-5′ 19 mers (6PS) | | | |
| 11* | AM-165 | Q327GfAfUf: 5′-3′ 21 mers (4PS) | | | |
| 12* | AM-166 | Q324Q303Q303Q303dA: | | | |
| | | 5′-3′ 21 mers (4PS) | | | |
| 13 | AM-156 | GfAfUf (6PS) | | | |

*“click” multiplex designs

[0854] Mouse TTR Serum Protein Methods:_TTR serum protein was quantified using a commercially available enzyme-linked immunosorbent assay, 41-ALBMS-E01 (ALPCO, Salem, NH), according to manufacturer's instructions. Briefly, serum samples were diluted 4000 fold in 1× ALPCO Kit Dilution Buffer. An 8-point mouse TTR standard curve was generated using 2.5× serial dilutions, ranging from 0 to 1000 ng/mL. Standards and samples (100 uL) were added to the plate and allowed to incubate for 30 minutes at room temperature. Plates were washed in 1× ALPCO Kit Wash Buffer and incubated for 20 minutes at room temperature with an affinity purified anti-Prealbumin antibody conjugated with horseradish peroxidase in a stabilizing buffer. After a wash in ALPCO Kit 1× Wash Buffer, plates were incubated for 10 minutes at room temperature in the dark with 3,3′,5,5′-tetramethybenzidine (TMB) and hydrogen peroxide in citric acid buffer at pH 3.3. Reactions were quenched with 100 μL of 0.3 mL sulfuric acid per well. Absorbance at 405 nm was read on a SpectraMax plate reader, and data were fit to a 4-parameter curve (y=(A−D)/(1+(x/C)\hat{ }B)+D) as calculated in Softmax Pro Software to determine serum TTR protein levels expressed in ug/mL. Protein levels at each time point were normalized to the respective group average of vehicle control serum protein values.

[0855] Results of in vivo Studies:_As described above, weekly timepoints were sampled until day 28. The samples were analyzed for TTF and F7 levels and compared to mixture. The results are shown in FIGS. 11 and 12. FIG. 11 show the F7 knockdown over time, while FIG. 12 shows the TTR knockdown over time.

### Example 7: N,N-Diethylamine as an Additive Scavenger Agent for the Deprotection of 5′-[O,O-bis(pivaloyloxymethyl)]-(E)-Vinyl Phosphonate Containing Oligonucleotides in Aqueous Ammonin

[0856] 5′-(E)-Vinylphopshonate (VP) is an effective bioisostere of the natural 5′-monophosphate in small interfering RNAs (siRNAs). Solid-phase synthesis of VP-siRNAs requires use of appropriately protected VP-phosphoramidites in combination with optimal oligonucleotide deprotection conditions. Addition of 3% (v) neat diethylamine to the standard aqueous ammonia deprotection conditions allows clean and rapid one-step deprotection of 5′-[0,0-bis(pivaloyloxymethyl)](POM)-protected VP oligonucleotides, minimizing side reactions and impurities and broadly enhancing the scope of VP oligonucleotide synthesis.

[0857] In recent years, oligonucleotide (ON)-based therapeutics, and RNA interference (RNAi)-based therapeutics in particular, have demonstrated clinical benefit for a variety of disease applications [(a) Selvam, C., Mutisya, D., Prakash, S., Ranganna, K. & Thilagavathi, R. Therapeutic potential of chemically modified siRNA: Recent trends. Chem. Biol. Drug Des. 90, 665-678 (2017); (b) Stein, C. A. & Castanotto, D. FDA-Approved Oligonucleotide Therapies in 2017. Molecular Therapy 25, 1069-1075 (2017); (c) Titze-de-Almeida, R., David, C. & Titze-de-Almeida, S. S. The Race of 10 Synthetic RNAi-Based Drugs to the Pharmaceutical Market. Pharm. Res. 34, 1339-1363 (2017)]. Recently, the positive outcome of the APOLLO Phase 3 clinical trial of patisiran in patients with hereditary ATTR amyloidosis, has realized the promise of bringing RNAi-based therapeutics to patients[(a) Adams, D., Gonzalez-Duarte, A., O'Riordan, W., Yang, C. C., Yamashita, T., Kristen, A., Tournev, I., Schmidt, H., Coelho, T., Berk, J., Lin, K. P., Sweetser, M., Gandhi, P., Chen, J., Gollob, J. & Suhr, O. B. Patisiran, an investigational RNAi therapeutic for the treatment of hereditary ATTR amyloidosis with polyneuropathy: results from the phase 3 APOLLO study. EU ATTR Meeting, Nov. 2, 2017, Paris, http://www.alnylam.com/wp-content/uploads/2017/2011/EU-ATTR 2017_APOLLOTRL_CAPELLA_FINAL_2012 Nov2017.pdf (2017); (b) Adams, D., Suhr, O. B., Dyck, P. J., Litchy, W. J., Leahy, R. G., Chen, J., Gollob, J. & Coelho, T. Trial design and rationale for APOLLO, a Phase 3, placebo-controlled study of patisiran in patients with hereditary ATTR amyloidosis with polyneuropathy. BMC Neurol 17, 181 (2017)]. Chemical modifications of siRNA are required for attributing drug-like properties by addressing metabolic instability, immune stimulation and overall unfavorable biodistribution and pharmacokinetics [(a) Manoharan, M. & Rajeev, K. G. Utilizing chemistry to harness RNA interference pathways for therapeutics: chemically modified siRNAs and antagomirs. (CRC Press LLC, 2008); (b) Shen, X. & Corey, D. R. Chemistry, mechanism and clinical status of antisense oligonucleotides and duplex RNAs. Nucleic Acids Research, 10.1093/nar/gkx1239 (2017)]. This was particularly impactful for the development of N-acetylgalactosamine (GalNAc)-siRNA conjugates [Nair, J. K., Willoughby, J. L. S., Chan, A., Charisse, K., Alam, M. R., Wang, Q., Hoekstra, M., Kandasamy, P., Kel'in, A. V., Milstein, S., Taneja, N., O'Shea, J., Shaikh, S., Zhang, L., van der Sluis, R. J., Jung, M. E., Akinc, A., Hutabarat, R., Kuchimanchi, S., Fitzgerald, K., Zimmermann, T., van Berkel, T. J. C., Maier, M. A., Rajeev, K. G. & Manoharan, M. Multivalent N-Acetylgalactosamine-Conjugated siRNA Localizes in Hepatocytes and Elicits Robust RNAi-Mediated Gene Silencing. J. Am. Chem. Soc. 136, 16958-16961 (2014).], allowing their rapid progress into clinical trials [(a) Fitzgerald, K., White, S., Borodovsky, A., Bettencourt, B. R., Strahs, A., Clausen, V., Wijngaard, P., Horton, J. D., Taubel, J., Brooks, A., Fernando, C., Kauffman, R. S., Kallend, D., Vaishnaw, A. & Simon, A. A highly durable RNAi therapeutic inhibitor of PCSK9. N. Engl. J. Med. 376, 41-51 (2017); (b) Pasi, K. J., Rangarajan, S., Georgiev, P., Mant, T., Creagh, M. D., Lissitchkov, T., Bevan, D., Austin, S., Hay, C. R., Hegemann, I., Kazmi, R., Chowdary, P., Gercheva-Kyuchukova, L., Mamonov, V., Timofeeva, M., Soh, C.-H., Garg, P., Vaishnaw, A., Akinc, A., Sorensen, B. & Ragni, M. V. Targeting of Antithrombin in Hemophilia A or B with RNAi Therapy. N Engl J Med 377, 819-828 (2017); (c) Zimmermann, T. S., Karsten, V., Chan, A., Chiesa, J., Boyce, M., Bettencourt, B. R., Hutabarat, R., Nochur, S., Vaishnaw, A. & Gollob, J. Clinical Proof of Concept for a Novel Hepatocyte-Targeting GalNAc-siRNA Conjugate. Mol. Ther. 25, 71-78 (2017)].

[0858] In GalNAc-siRNA conjugates, use of ribose modifications such as 2′-O-methyl (OMe) and 2′-deoxy-2′-fluoro (F) were vital to achieving high in vivo potency and duration of action[(a) Foster, D. J., Brown, C. R., Shaikh, S., Trapp, C., Schlegel, M. K., Qian, K., Sehgal, A., Rajeev, K. G., Jadhav, V., Manoharan, M., Kuchimanchi, S., Maier, M. A. & Milstein, S. Advanced siRNA Designs Further Improve in vivo Performance of GalNAc-siRNA Conjugates. Molecular Therapy, doi.org/10.1016/j.ymthe.2017.1012.1021 (2018); (b) Nair, J. K., Attarwala, H., Sehgal, A., Wang, Q., Aluri, K., Zhang, X., Gao, M., Liu, J., Indrakanti, R., Schofield, S., Kretschmer, P., Brown, C. R., Gupta, S., Willoughby, J. L. S., Boshar, J. A., Jadhav, V., Charisse, K., Zimmermann, T., Fitzgerald, K., Manoharan, M., Rajeev, K. G., Akinc, A., Hutabarat, R. & Maier, M. A. Impact of enhanced metabolic stability on pharmacokinetics and pharmacodynamics of GalNAc-siRNA conjugates. Nucleic Acids Res 45, 10969-10977 (2017)]. However, substantial chemical modifications can hamper endogenous 5′-monophosphorylation of the siRNA. Indeed, Clp1 kinase-mediated phosphorylation of the siRNA antisense strand is a critical step that leads to effective loading into the Argonaute (Ago2) protein of the RNA-induced silencing complex (RISC) to elicit gene silencing[(a) Weitzer, S. & Martinez, J. The human RNA kinase hClp1 is active on 3′ transfer RNA exons and short interfering RNAs. Nature 447, 222-226 (2007); (b) Schirle, N. T., Kinberger, G. A., Murray, H. F., Lima, W. F., Prakash, T. P. & MacRae, I. J. Structural Analysis of Human Argonaute-2 Bound to a Modified siRNA Guide. J. Am. Chem. Soc. 138, 8694-8697 (2016); (c) Tolia, N. H. & Joshua-Tor, L. Slicer and the Argonautes. Nat. Chem. Biol. 3, 36-43 (2006)]. In addition, the chemical introduction of an unmodified 5′-monophosphate to the antisense strand does not circumvent this phosphorylation issue, as 5′-monophosphates are rapidly hydrolyzed by phosphatases in the lysosomal compartment[Lima, W. F., Prakash, T. P., Murray, H. M., Kinberger, G. A., Li, W., Chappell, A. E., Li, C. S., Murray, S. F., Gaus, H., Seth, P. P., Swayze, E. E. & Crooke, S. T. Single-Stranded siRNAs Activate RNAi in Animals. Cell 150, 883-894 (2012)]. Recently, several phosphatase-stable phosphate mimics for use in therapeutic siRNAs have been developed [(a) Haraszti, R. A., Roux, L., Coles, A. H., Turanov, A. A., Alterman, J. F., Echeverria, D., Godinho, B. M., Aronin, N. & Khvorova, A. 5′-Vinylphosphonate improves tissue accumulation and efficacy of conjugated siRNAs in vivo. Nucleic Acids Research (2017); (b) Parmar, R., Willoughby, J. L. S., Liu, J., Foster, D. J., Brigham, B., Theile, C. S., Charisse, K., Akinc, A., Guidry, E., Pei, Y., Strapps, W., Cancilla, M., Stanton, M. G., Rajeev, K. G., Sepp-Lorenzino, L., Manoharan, M., Meyers, R., Maier, M. A. & Jadhav, V. 5′-(E)-Vinylphosphonate: A Stable Phosphate Mimic Can Improve the RNAi Activity of siRNA-GalNAc Conjugates. ChemBioChem 17, 985-989 (2016); (c) Prakash, T. P., Lima, W. F., Murray, H. M., Li, W., Kinberger, G. A., Chappell, A. E., Gaus, H., Seth, P. P., Bhat, B., Crooke, S. T. & Swayze, E. E. Identification of metabolically stable 5′-phosphate analogs that support single-stranded siRNA activity. Nucleic Acids Res. 43, 2993-3011 (2015) (d) Zlatev, I., Foster, D. J., Liu, J., Charisse, K., Brigham, B., Parmar, R. G., Jadhav, V., Maier, M. A., Rajeev, K. G., Egli, M. & Manoharan, M. 5′-C-Malonyl RNA: Small Interfering RNAs Modified with 5′-Monophosphate Bioisostere Demonstrate Gene Silencing Activity. ACS Chemical Biology 11, 953-960 (2016)]. Among them, the (E)-vinylphosphonate (VP) has proved to be the most effective bioisostere of natural 5′-monophosphate[(a) Elkayam, E., Joshua-Tor, L., Parmar, R., Brown, C. R., Willoughby, J. L., Theile, C. S. & Manoharan, M. siRNA carrying an (E)-vinylphosphonate moiety at the 5 end of the guide strand augments gene silencing by enhanced binding to human Argonaute-2. Nucleic Acids Res 45, 3528-3536 (2017); (b) Prakash, T. P., Kinberger, G. A., Murray, H. M., Chappell, A., Riney, S., Graham, M. J., Lima, W. F., Swayze, E. E. & Seth, P. P. Synergistic effect of phosphorothioate, 5′-vinylphosphonate and GalNAc modifications for enhancing activity of synthetic siRNA. Bioorg. Med. Chem. Lett. 26, 2817-2820 (2016)]. When added to the 5′-end of the antisense strand of siRNA, VP provided enhanced metabolic stability and enhanced potency in vivo.

[0859] Efficient solid-phase synthesis of VP-siRNA requires appropriately protected VP-phosphoramidites in combination with optimal ON deprotection conditions. The first iteration of VP-siRNA synthesis was the use of 5′-(O,O-diethyl) VP phosphoramidites during ON synthesis. Removal of the two VP ethyl groups, however, requires harsh deprotection conditions performed on the ON still attached to the solid support, using trimethyl silyl iodide and mercaptoethanol, leading to decomposition and/or side products, resulting in lower yields. Another VP protecting group, the 5′-[O,O-bis(pivaloyloxymethyl)](POM) VP is more compatible with standard solid-phase synthesis, which could facilitate and enable large-scale synthesis of 5′-phosphonate-modified ONs[Parmar, R., Brown, C. R., Matsuda, S., Willoughby, J. L., Theile, C. S., Charisse, K., Foster, D. J., Zlatev, I., Jadhav, V., Maier, M. A., Egli, M., Manoharan, M. & Rajeev, K. G. Facile Synthesis, Geometry and 2′-Substituent-Dependent In Vivo Activity of 5′-(E)- and 5′-(Z)-Vinylphosphonate-Modified siRNA Conjugates. J. Med. Chem. DOI:10.1021/acs.jmedchem.7b01147 (2018)].

### Results and Discussion

[0860] Herein is established optimal conditions of POM VP deprotection, providing for a clean and rapid one-step procedure, minimizing side reactions and impurities, and broadly enhancing the scope of VP ON synthesis. A standard two-step ON deprotection protocol was initially applied including: (i) treatment of the support-bound POM VP ON with a steady flow of a base solution (e.g. diethylamine or piperidine) in acetonitrile [Capaldi, D. C., Gaus, H., Krotz, A. H., Arnold, J., Carty, R. L., Moore, M. N., Scozzari, A. N., Lowery, K., Cole, D. L. & Ravikumar, V. T. Synthesis of High-Quality Antisense Drugs. Addition of Acrylonitrile to Phosphorothioate Oligonucleotides: Adduct Characterization and Avoidance. Organic Process Research & Development 7, 832-838 (2003)], followed by (ii) incubation of the solid support with saturated (28-30%—w/v) aqueous ammonia (ammonium hydroxide solution). It was found that the presence of the POM VP 5′-terminal nucleotide induced base-mediated strand cleavage: the 5′-terminal nucleotide was lost from the VP compound I, leaving the corresponding N-1 structure II, with a 5′-monophosphate attached to it, as the major impurity (−317 amu, ˜20%) to the desired full-length VP compound III. Scheme 34 shows the deprotection scheme and compounds I, II and III. The deprotection can be by using the two step protocol, (i) and (ii) as described above, or conditons shown in 7 (below).

[chemical structure]

[0861] Without being bound by any specific theory, it is hypothesized that in presence of the POM VP phosphonotriester at the terminal 5′-nucleotide, its 4′ proton is especially labile to base due to the possibility of delocalizing the resulting negative charge within the VP phosphonotriester moiety. This leads to a β-elimination reaction where the leaving group is the 3′-O-phosphate and the rest of the ON. On the other hand, when the on-support piperidine treatment was not performed (Scheme 34, step (ii) only), the N-1 compound II (−317 amu) was not observed. However, in absence of the on column base treatment, significant amount of acrylonitrile adduct (+53 amu) was detected, yielded by the addition of acrylonitrile released from the phosphate protecting cyanoethyl groups to the N¹ position of the uracil bases Structure A below.

[0862] A way to avoid these acrylonitrile adducts is to replace the single step ammonia treatment with a more nucleophilic base (e.g. methylamine), that would be an effective scavenger of acrylonitrile. However, the use of stronger nucleophile amines can generate another uracil base impurity, yielded by the nucleophilic addition of the amine to the C-6 position (Structure B), an intermediary in the depyrimidination decomposition cascade[(a) Dellinger, D. J., Timár, Z., Myerson, J., Sierzchala, A. B., Turner, J., Ferreira, F., Kupihár, Z., Dellinger, G., Hill, K. W., Powell, J. A., Sampson, J. R. & Caruthers, M. H. Streamlined Process for the Chemical Synthesis of RNA Using 2′-O-Thionocarbamate-Protected Nucleoside Phosphoramidites in the Solid Phase. Journal of the American Chemical Society 133, 11540-11556 (2011); (b) Shetlar, M. D., Hom, K. & Venditto, V. J. Photohydrate-Mediated Reactions of Uridine, 2′-Deoxyuridine and 2′-Deoxycytidine with Amines at Near Neutral pH. Photochemistry and Photobiology 89, 869-877 (2013)].

[chemical structure]

[0863] Thymine and uracil are reported to be the nucleobases that are most sensitive to generating A and B as impurities. Structure A is N¹-cyanoethyl adducts of uracil (Y=H) or thymine (Y=Me) and structure B is a C-6 amino adducts of uracil. A “worst-case scenario” ON-1, an alternating 2′-deoxythymidine-2′-fluorouridine 20-mer (Table 8) was selected for experimentation. 2′-Deoxythymidine is well known to be the most susceptible nucleotide for acrylonitrile addition [Umemoto, T. & Wada, T. Nitromethane as a scavenger of acrylonitrile in the deprotection of synthetic oligonucleotides. Tetrahedron Letters 46, 4251-4253 (2005)], while 2′-fluorouridine is easily degraded by strong amine bases, such as methylamine. ON-1 allowed experimentation focused on narrowly exploring the nucleobase impurities A and B, before translating the most optimal conditions to a POM VP ON.

[0864] Cleavage of ON-1 from the controlled pore glass (CPG) solid support was first performed using four commonly employed deprotection conditions (Table 8, Entries 1-4): Entry 1: direct incubation with 28-30% aqueous ammonia at 35° C. for 20 h; Entry 2: incubation with 40% w/v aqueous methylamine for 15 minutes at 60° C.; Entry 3: incubation with 1:1 (v/v) mixture of ammonia and methylamine (AMA) for 3 h at rt; Entry 4: incubation with aqueous ammonia at 35° C. for 20 h, after pre-treatment by washing the CPG with a flow of 5% piperidine in ACN, three times over 15 min. The single ammonia incubation sample, showed a large amount of +53 amu acrylonitrile adducts (Entry 1, Table 9). Meanwhile the quick treatment with methylamine, which was the current standard for deprotection of POM protected VP ONs, showed significant amounts of adducts of methylamine to the uracil (and thymine) bases (Entry 2, Table 9). Similar significant methylamine adducts (c.a. 20%) were also observed with the AMA treatment (Entry 3, Table 9). Albeit being incompatible with VP ON deprotection (Scheme 1), the piperidine pre-treated support condition (Entry 4, Table 9) showed no acrylonitrile nor amine adducts on ON-1, and was set as the benchmark to emulate in our search for the future most optimal deprotection conditions.

[0865] Following these benchmark studies, we set to replace the on-column piperidine treatment with direct addition of various amines to the ammonia deprotection solution in order to scavenge acrylonitrile. This treatment was designed to eliminate any VP-related N-1 impurities while also minimizing all nucleobase adduct impurities.

[0866] Methylamine, n-butylamine, n-propylamine, or diethylamine, all of which are readily available and inexpensive, were added as scavengers (3%, v/v) to the aqueous ammonia solution during cleavage of ON-1 at 35° C. for 20 h (Table 8). Other more hydrophobic amines were not included in these studies, since in our previous experience they tend to associate to the phosphate backbone and are difficult to separate during purification. In addition, a previously described acrylonitrile scavenger, nitromethane, showed good results but produced dark coloration of the media and made analysis and purification difficult (example in Supporting Information). The major by-products observed (A and B) were quantified by RP-HPLC/MS analysis. While the amine adduct peaks were easily quantifiable by LC/MS analysis, due to their distinct retention time shift, the acrylonitrile adducts tended to co-elute with the main product peak and only the relative abundance determined by LC/MS could be reported (Table 9)

TABLE 9
Deprotection of solid support-bound poly-(2′-deoxythymidine-2′-fluorouridine)
ON (ON-1) and POM VP ON (ON-2) in various conditions.

| | | | Acrylonitrile | Amine |
|---|---|---|---|---|
| Entry | ON^{a, b} | Deprotection Conditions | Adducts A^{c} | Adducts B^{c} |
| 1 | ON-1 | 28-30% (w/v) NH₄OH, 35° C., 20 h | 9.9% | n.d.^{d} |
| 2 | ON-1 | 40% (w/v) Methylamine, 35° C., 20 h | n.d. | 19.2% |
| 3 | ON-1 | 40% (w/v) Methylamine/NH₄OH - 1:1 | n.d. | 21.5% |
| | | (v/v, AMA), rt, 2 h | | |
| 4 | ON-1 | Pre-treatment with 5% (v/v) piperidine, | n.d. | n.d. |
| | | steady flow, 3 × 5 min, followed | | |
| | | by NH₄OH, 35° C., 20 h | | |
| 5 | ON-1 | 3% (v/v) Methylamine in NH₄OH, 35° C., 20 h | 7.4% mixture | |
| 6 | ON-1 | 3% (v/v) n-Propylamine in NH₄OH, 35° C., 20 h | 2.0% | 7.7% |
| 7 | ON-1 | 3% (v/v) n-Butylamine in NH₄OH, 35° C., 20 h | 2.6% | 6.7% |
| 8 | ON-1 | 3% (v/v) Diethylamine in NH₄OH, 35° C., 20 h | 1.9% | 1.4% |
| 9 | ON-1 | 3% (v/v) Diethylamine in NH₄OH, 60° C., 5 h | 2.8% | n.d. |
| 10 | ON-1 | 5%(v/v) Diethylamine in NH₄OH, 35° C., 20 h | 1.6% | 1.4% |
| 11 | ON-1 | 5% (v/v) Diethylamine in NH₄OH, 60° C., 5 h | 2.1% | 2.3% |
| 12 | ON-2 | 40% (w/v) Methylamine, 60° C., 15 min | n.d. | 5.5% |
| 13 | ON-2 | Pre-treatment with 5% (v/v) piperidine, | n.d.* | n.d.* |
| | | steady flow, 3 × 5 min, followed | | |
| | | by NH₄OH, 35° C., 20 h | | |
| 14 | ON-2 | 28-30% (w/v) NH₄OH, 35° C., 20 h | 4.3% | n.d. |
| 15 | ON-2 | 3% (v/v) Methylamine in NH₄OH, 35° C., 20 h | n.d. | 3.8% |
| 16 | ON-2 | 3% (v/v) Diethylamine in NH₄OH, 35° C., 20 h | n.d. | n.d. |
| 17 | ON-2 | 3% (v/v) Diethylamine in NH₄OH, 60° C., 5 h | n.d. | n.d. |

^{a, b}50 mg of CPG support (~80 μmol/g) with ON-1 or ON-2 were incubated with 1000 μL of deprotection solution according to Scheme 1 and the conditions in Table 1.
^{a}Sequence of ON-1: 5′-UdTUdTUdTUdTUdTUdTUdTUdTUdTUdTu-3′ (SEQ ID NO: 7) where U is 2′-fluorouridine, dT is 2′-deoxythymidine and u is 2′-O-methyluridine.
^{b}Sequence of ON-2: 5′-(VP)uUuCgAaUcAaucCaAcAgUagu-3′ (SEQ ID NO: 8) where lower case nucleotides are 2′-O-methy and upper case italicized nucleotides are 2′-fluoro.
^{c}Percentage of impurities calculated by integrating peaks of the crude material on the UV-LC/MS spectrum at 260 nm. RP-LC/MS run on a C8 column.
^{d}n.d.—not detected (<1.0%).
*Formation of 19.4% of N-1 product (−317.29 amu), as described in Scheme 34).

[0867] From these experiments it was determined that, compared to the other amines used, 3% diethylamine (DEA) provided excellent results in terms of product purity and yield, with minimal amounts of both nucleobase adducts generated (Table 9, Entries 5-8). Based on these results, propyl- and butylamines were not considered any further. Furthermore, incubation with the 3% DEA ammonia at 60° C. for 5 h (Table 9, Entry 9) provided results nearly identical to those of the incubation at 35° C. for 20 h, allowing for flexibility and a reduced time of deprotection, if desired. Although overall most effective, the 3% DEA solution did not fully remove acrylonitrile adducts. Therefore, we tested whether an increased 5% DEA (v/v) solution would reduce such impurities with ON-1 at 35° C. and 60° C. (Table 9, Entries 10 and 11). However, we obtained nearly indistinguishable results as observed with the 3% DEA solution.

[0868] These same testing conditions were then applied to an oligonucleotide with 2′-F/OMe chemical modifications and the POM-protected VP (ON2, Table 9. Again, the previous standard of methylamine treatment for 15 minutes at 60° C. showed a large amount of methylamine adduct (Table 9, Entry 12), while the pretreatment with piperidine caused the N-1 product (Entry 13), and pure ammonia had a large amount of acrylonitrile adduct (Table 9, Entry 14). When the scavenger amines were tested as a 3% solution (methylamine and DEA), acrylonitrile adducts were largely absent and no N-1 plus phosphate was seen (Table 9, Entries 15-16). However, amine adducts were observed in the case of methylamine, whereas in the DEA conditions, no detectable adduct was observed. As show in Table 10, the results of the 3% DEA in ammonia solution were repeated among several other 2′-F/OMe modified sequences with and without phosphorothioate modifications, showing a clean profile with no acrylonitrile or amine adducts forming. Likewise, a comparison of deprotections at 35° C. for 20 hours and 60° C. for 5 hours showed nearly identical results therefore allowing for more rapid deprotection when desired.

TABLE 10
Deprotection of solid support-bound POM VP ONs in various scales using the optimal
3% diethylamine scavenger in aqueous ammonia. Incubation at 35° C. for 20 h (ON-3-
ON-6) or 60° C. for 5 h (ON-7). (Table 10 discloses SEQ ID NOS 44-48, respectively,
in order of appearance)

| Scaleª | | | Acrylonitrile | Amine |
|---|---|---|---|---|
| (μmol) | ON | Sequence^{b} | Adducts A^{c} | Adducts B^{c} |
| 10 | ON-3 | (VP)u•U•agaAaUAagugGuAgucac•u•u | n.d.d | n.d. |
| 10 | ON-4 | (VP)u•U•ucuGgCAuucuUcAuuugu•u•a | n.d. | n.d. |
| 100 | ON-5 | (VP)uAaagCacuuuauUgAguuuc•u•g | n.d. | n.d. |
| 100 | ON-6 | (VP)uCguuUucaaagcAcUuuauu•g•a | n.d. | n.d. |
| 320 | ON-7 | (VP)u•A•uugAcCCaaaaUuCaacaa•u•g | n.d. | n.d. |

ªBased on the amount and the loading of the CPG support used.
^{b}Lower case nucleotides are 2′-O-methy and upper case italicized nucleotides are 2′-fluoro.
• is phosphorothioate diester linkage between nucleotides.
^{c}Percentage of impurities calculated by integrating peaks of the crude material on the UV-LC/MS spectrum at 260 nm. RP-LC/MS run on a C8 column.
^{d}n.d.-not detected (<1.0%).

[0869] POM protected VP moiety is a stable phosphate mimic that can be readily deprotected using standard oligonucleotide deprotection reagents. Instead of pretreatment with a diethylamine or piperidine solution, which causes undesired byproducts, a 3% solution of DEA in aqueous ammonia as described herein can be used for cleavage at either 35° C. for 20 h or 60° C. for 5 h to yield a crude ON in good yield and purity for subsequent ion exchange or reverse phase purification. The conditions reported herein minimize the acrylonitrile and methylamine adducts observed during conventional deprotection, provide higher yields and may be used as a general deprotection of other oligonucleotides with or without the POM protected VP.

### Example 8: Threofuranosyl Nucleic Acid (TNA) Gene Silencing Activity of siRNA

[0870] α-(L)-threofuranosyl nucleic acid with a (3′-2′) phosphodiester backbone (TNA), are nucleic acid alternatives [Schoning, K. U. et al. Science 2000, 290, 1347]. The sugar-phosphate backbone of TNA and, for comparison RNA, are shown in FIG. 13. TNA consists of unnatural four-carbon threose sugar and has a unique sugar-phosphate backbone that allows the formation of stable, antiparallel Watson-Crick duplex structures. TNA also shows efficient cross-pairing with complementary strands of DNA and RNA, and exhibits strong nuclease stability under biologically relevant conditions. Even though TNA has been well-studied in terms of its base pairing properties and structural features [(a) Wilds, C. J. et al. J. Am. Chem. Soc. 2002, 124, 13716. (b) Pallan, P. S. et al. Angew. Chem. Int. Ed. 2003, 42, 5893. (c) Anosova I. et al. ChemBioChem 2016, 17, 1705. (d) Ebert, M. O. et al. J. Am. Chem. Soc. 2008, 130, 15105. (e) Schoning, K. U. et al. Helv. Chim. Acta 2002, 85, 399], little is known about its potential application in the context of short interfering RNAs (siRNAs).

[0871] Exemplary siRNA modifications are 5′-Methyl [Kel'in, A. V. et al. J. Org. Chem. 2016, 81, 2261], siRNA-GalNAc conjugate [(a) Nair, J. K. et al. J. Am. Chem. Soc. 2014, 136, 16958. (b) Matsuda, S. et al. ACS Chem. Biol., 2015, 10, 1181. (c) Rajeev, K. G. ChemBioChem 2015, 16, 903. (d) Nair, J. K. et al. Nucleic Acids Res. 2017, 45, 10969. (e) Meade, B. R. et al. Nature Biotechnol. 2014, 32, 1256], 4′-modification [(a) Liboska, R. et al. Org. Biomol. Chem. 2011, 9, 8261. (b) Martinez-Montero, S. et al. ACS Chem. Biol., 2015, 10, 2016. (c) Malek-Adamian, E. et al. J. Am. Chem. Soc. 2017, 139, 14542. (d) Malek-Adamian, E. et al. J. Org. Chem. 2018, doi:10.1021/acs.joc.8b01329. (e) Harp, J. M. et al. Nucleic Acids Res. 2018, doi: 10.1093/nar/gky703], GNA [(a) Schlegel, M. K. et al. J. Am. Chem. Soc. 2017, 139, 8537. (b) Janas, M. M. et al. Nature Communications 2018, 9, 723] and Vinylphosphonate [(a) Parmar, R. et al. ChemBioChem 2016, 17, 985. (b) Elkayam, E. et al. Nucleic Acids Res. 2017, 45, 3528. (c) Parmar, R. G. et al. J. Med. Chem 2018, 61, 734. (d) Schirle, N. T. et al. J. Am. Chem. Soc. 2016, 138, 8694].

[0872] The TNA phosphoramidite building blocks can be sythesised and incorporated into siRNA using optimized synthesis conditions as depicted in Scheme 35 [Sau, S. P. et al. J. Org. Chem., 2016, 81, 2302]. The effects of TNA incorporation on the oligonucleotide metabolic stability, duplex thermal stability and in vitro gene silencing activity of siRNAs were evaluated.

[chemical structure]

[0873] Synthesis of ^{5-Me}C-TNA (Compound 2): An example for the preparation of the TNA building block ^{5-Me}C-TNA is shown by Scheme 36.

[chemical structure]

[0874] Synthesis of compound 2: To a solution of compound 1 (5.00 g, 7.89 mmol) in CH₂Cl₂ (40 ml) was added DIPEA (4.13 ml, 23.7 mmol) and 2-cyanoethyl N,N-diisopropylchlorophosphoramidite (2.11 ml, 9.47 mmol) at 0° C. The reaction mixture was allowed to room temperature and stirred for 3 h. The reaction mixture was diluted with CH₂Cl₂ (200 mL) then washed with saturated NaHCO₃ aqueous solution (100 mL). The organic layer was separated, dried over anhydrous Na₂SO₄, filtered and concentrated. The crude material was purified by flash silica gel column chromatography (0-33% EtOAc in hexanes) to give compound 2 (5.90 g, 7.07 mmol, 90%, R_{f}=0.36 developed with 33% EtOAc in hexanes) as a pale yellow foam. ¹H NMR (400 MHz, DMSO-d₆): δ 13.40 (s, 1H), 8.30 (d, J=7.5 Hz, 2H), 7.83-7.09 (m, 13H), 6.94-6.68 (m, 4H), 5.87-5.59 (m, 1H), 4.30-4.24 (m, 1H), 4.15-4.05 (m, 2H), 3.91-3.47 (m, 13H), 2.72-2.33 (m, 3H), 1.29-0.93 (m, 12H). ³¹P NMR (162 MHz, CD₃CN): δ 152.98, 151.73. ¹³C NMR (126 MHz, CD₃CN): δ 180.24, 161.79, 159.88, 159.85, 148.60, 145.88, 140.44, 138.41, 136.81, 136.75, 136.72, 136.55, 133.35, 130.93, 130.85, 130.81, 130.54, 129.19, 129.17, 129.13, 128.80, 128.70, 127.99, 127.97, 119.58, 119.32, 118.27, 114.58, 114.51, 114.48, 110.44, 110.34, 93.13, 93.07, 92.88, 92.86, 89.09, 89.03, 81.98, 81.84, 81.72, 78.51, 78.46, 78.17, 78.15, 76.46, 76.34, 59.64, 59.48, 59.45, 59.30, 55.95, 55.93, 44.42, 44.31, 44.24, 44.14, 24.90, 24.87, 24.83, 24.82, 24.77, 24.73, 24.68, 20.87, 20.81, 20.72, 20.66, 13.80, 13.78.

[0875] Stability of modified oligonucleotides toward 3′- or 5′-specific exonucleases: Oligonucleotides were prepared in a final concentration of 0.1 mg/mL in either 50 mM Tris (pH 7.2), 10 mM MgCl₂ or 50 mM sodium acetate (pH 6.5), 10 mM MgCl₂ for assessing the stability towards 3′- or 5′-specific exonucleases, respectively. The exonuclease (150 mU/mL SVPDE for 3′-stability or 500 mU/mL phosphodiesterase II for 5′-stability) was added immediately prior to analysis via IEX HPLC (dionex DNAPac PA200, 4×250 mm) using a gradient of 37-52% mobile phase (1 M NaBr, 20 mM sodium phosphate, pH 11, 15% MeCN; stationary phase: 20 mM sodium phosphate, 15% MeCN, pH 11) over 7.5 min with a flow of 1 mL/min. Samples were analyzed at given time points for up to 24 h. The quantity of full length oligonucleotides was determined as the area under the curve at A₂₆₀. Percent full length oligonucleotides was calculated by dividing by the area under the curve at t=0 and multiplying by 100. Activity of enzyme was verified for each experiment by including a oligodeoxythymidylate with a terminal phosphorothioate linkage (5′-T₁₉·T (SEQ ID NO: 708) or 5′-T·T₁₉ (SEQ ID NO: 708) for 3′- or 5′-exonuclease activity, respectively). Each aliquot of enzyme was thawed just prior to the experiment. The half-life was determined by fitting to first order kinetics.

[0876] Results for the stability of TNA modified oligonucleotides against 3′-Exonuclease are shown in FIG. 14. Single incorporation of T-TNA (oligo 5) showed ˜5-fold improvement of the stability when compared to a single PS bond 3′-dTsdT (oligo 1). Double incorporation of T-TNA (oligo 7) provided significant stabilization of a PO bond with >8-fold resistance against 3′-exo nuclease when compared to 3′-dTsdT. TNA-T showed remarkable stability when compared to 2′-F—U (oligo 7 vs 3).

[0877] Results for the stability of TNA modified oligonucleotides against 5′-exonuclease are shown in FIG. 15. T-TNA provides significant stabilization of a PO bond (oligo 10) with >10 fold resistance to degradation by phosphodiesterase II compared to a single PS bond (5′-dTsdT). T-TNA in combination with a PS bond (oligo 11) is remarkably resistant to degradation under these conditions (˜4% degradation in 24 h).

[0878] Determination of UV thermal melting temperatures:_Thermal melting temperatures were measured with equimolar concentrations of both strands (2.5 μM) in 1×PBS ([NaCl]=137 mM, [KCl]=2.7 mM, [Na₂HPO₄]=10 mM, [KH₂PO₄]=1.8 mM, pH 7.4) by monitoring A₂₆₀ with increasing temperature (1° C./min). Values were reported as the maximum of the first derivative and are the average of at least two experiments. The results are shown in Tables 11 and 12. TNA showed minor destabilization in DNA and larger destabilization in RNA. The structures x and y are shown here:

[chemical structure]

TABLE 11
Thermal Stability of TNA Modified Oligonucleotides. RNA (X) duplex. (Table 11
discloses SEQ ID NOS 49-56, respectively, in order of appearance)

| Duplex | Sequence | Tₘ value | ΔTₘ |
|---|---|---|---|
| RNA-RNA | 5′-UACAGUCUAUGU-3′ | 52.6° C. | — |
| control | 5′-ACAUAGACUGUA-3′ | | |
| RNA (X) duplex | 5′-UACAGXCUAUGU-3′ | 47.7° C. | −4.9° C. |
| | 5′-ACAUAGACUGUA-3′ | | |
| DNA-DNA | 5′-dTdAdCdAdGdTdCdTdAdTdGdT-3′ | 43.0° C. | — |
| control | 5′-dAdCdAdTdAdGdAdCdTdGdTdA-3′ | | |
| DNA (X) duplex | 5′-dTdAdCdAdGXdCdTdAdTdGdT-3′ | 40.8° C. | −2.2° C. |
| | 5′-dAdCdAdTdAdGdAdCdTdGdTdA-3′ | | |

TABLE 12
Thermal Stability of TNA Modified Oligonucleotides. RNA (Y) (Table 12 discloses SEQ
ID NOS 57-64, respectively, in order of appearance)

| Duplex | Sequence | Tₘ value | ΔTₘ |
|---|---|---|---|
| RNA-RNA | 5′-UACAGUCUAUGU-3′ | 52.3° C. | — |
| control | 5′-ACAUAGACUGUA-3′ | | |
| RNA (Y) duplex | 5′-UACAGUYUAUGU-3′ | 47.1° C. | −5.2° C. |
| | 5′-ACAUAGACUGUA-3′ | | |
| DNA-DNA | 5′-dTdAdCdAdGdCdCdTdAdTdGdT-3′ | 48.3° C. | — |
| control | 5′-dAdCdAdTdAdGdGdCdTdGdTdA-3′ | | |
| DNA (Y) duplex | 5′-dTdAdCdAdGYdCdTdAdTdGdT-3′ | 47.8° C. | −0.50° C. |
| | 5′-dAdCdAdTdAdGdGdCdTdGdTdA-3′ | | |

[0879] RT qPCR for Ttr mRNA quantification:_Primary mouse hepatocytes (PMH) were cultured in Williams E Medium with 10% fetal bovine serum. Transfection of cells using RNAiMAX reagent was done as per the manufacturer's recommended protocol. Thus, cells were thawed immediately prior to transfection and then plated onto 384-well plates with a seed density of ˜5000 cells/well. Pre-incubated lipid/siRNA complex (0.1 μL RNAiMax, siRNA, in 5 μL Opti-MEM for 15 min) was added to a 384-well collagen-coated plate (BioCoat; Corning) and cells were incubated for 20 h at 37° C. in an atmosphere of 5% CO₂. Eight 6-fold serial dilutions ranging from 10 to 0.036 nM were used to perform dose response experiments. Media was removed before washing and lysing the cells. Using Dynabeads mRNA isolation kit according to manufacturer's protocol, RNA was extracted and subsequently reverse-transcribed with the ABI high capacity cDNA reverse transcription kit. Quantification was done by real-time PCR, whereby the cDNA (2 μL) was added to a master mix that contained 0.5 μL mouse Gapdh TaqMan Probe, 0.5 μL Ttr TaqMan probes, and 5 μL Lightcycler 480 probe master mix per well in a 384-well 50 plate. Real-time PCR was accomplished in an ABI 7900HT RT-PCR system using the ΔΔCt (RQ) assay. Each duplex and concentration was tested in four biological replicates. To calculate relative fold change, real time data were analyzed using the ΔΔCt method and normalized to assays performed with cells transfected with 10 nM nonspecific siRNA. IC50 values were calculated using a 4-parameter fit model using XLFit.

[0880] FIG. 16 shows the influence of Single TNA Nucleotide incorporation on in vitro siRNA activity. FIG. 17 shows the influence of single TNA Base Pair Incorporation on in vitro siRNA activity. FIG. 18 shows dose response curves of in vitro Gene silencing assay.

[0881] In Vivo Screening: All studies were conducted using protocols consistent with local, state and federal regulations, as applicable, and approved by an Institutional Animal Care and Use Committee (IACUC). Animals received a single subscapular subcutaneous injection of 1 mg/kg siRNA, prepared as an injection volume of 10 μL/g in PBS. At the indicated time pre- or postdosing, animals were anesthetized with isofluorane and blood obtained via retroorbital bleed. TTR protein was quantified by ELISA from serum isolated from whole blood. ELISA was performed according to manufacturer protocol (ALPCO, 41-PALMS-E01) after a 3025-fold dilution of the serum samples. Data were normalized to pre-bleed TTR levels. All samples were assayed in duplicate and each data point is the average of all the mice within each cohort (n=3). Data were analyzed using a two-way ANOVA with a Tukey posthoc test for multiple comparison in GraphPad Prism.

[0882] The results of in vivo screening are shown by FIGS. 19 and 20, showing the effect of in vivo gene silencing in mice Using TNA-Modified siRNA duplexes on serum TTR Levels. FIG. 19 is a line graph showing the results while FIG. 20 is a bar graph showing the results.

[0883] Single incorporation of T-TNA provides significant stabilization of a PO bond both at 3′ and 5′ ends, with ˜5 fold and 10 fold improvements, respectively, when compared to a single PS bond. Tm studies using model sequences showed TNA showed minor destabilization in DNA and larger destabilization in RNA. The incorporation of single TNA nucleotides into the seed region of siRNA duplexes resulted in similar levels of knockdown of TTR mRNA in vitro. In addition, siRNA containing TNA base-pairs within the seed region demonstrated comparable knockdown in vitro to the corresponding parent siRNA. In vivo gene silencing correlated well with the in vitro results for duplexes containing a single TNA substitution and the structural model suggests that TNA is well accommodated in the duplex bound to Ago2. A structural model of TNA Bound to hAgo2 is shown by FIG. 21.

### Example 9: Oligonucleotide Building Blocks Containing 5′-(R) and (S)-Methyl Guanosine

[0884] Chemical modification of the nucleoside monomers that constitute siRNA strands can modulate the potency, thermodynamic stability and can enhance biostability of these nucleic acid-based drugs. They can also potentially reduce the off-target effects of siRNAs. Stereoisomerically pure 5′-C-methyl 2′-deoxy and 2′-O-methyl and 2′-fluoro modified nucleosides were synthesized and these monomers were incorporated into siRNAs. The 5′-C-methyl pyrimidine nucleosides were prepared from the corresponding appropriately protected 2′-modified or 2′-deoxy nucleoside precursors [Kel'in, Alexander et al., J. Org. Chem. 2016, 81, 2261-2279]. The 2′-modified 5′-C-methyl pyrimidine-containing siRNAs had better exonuclease stability than the siRNAs with 5′-C-methyl deoxy residues. Herein is also reported the synthesis of 5′-(R)- and (S)-methyl guanosine building blocks. The 5′-C-methyl guanosine has been synthesized in the past by Beigelman et al. starting from L-rhamnose [Beigelman, Karpeisky, and Usman, Nucleosides Nucleotides 1995, 14, 901] as shown in scheme 37. In contrast to that approach, we started from guanosine, which was appropriately 3′-protected, oxidized, and methylated at the 5′ position as shown in scheme 38. Pure (R) and (S) isomers were isolated and used to make the corresponding phosphoramidites, controlled-pore glass (CPG), and triphosphates. Various 5′-(R)- and (S)-methyl guanosine building blocks were synthesized by these methods as shown in FIG. 22. Chemical modification of the nucleoside monomers that constitute siRNA strands can modulate the potency.

[chemical structure]

[0885] Scheme 37 reagents and conditions are: (i) H₂SO₄, CuSO₄/Acetone, R.T. (ii) TsCl/Pyridine, 0° C. to R.T. (iii) NaOMe/MeOH, 0° C. to R.T. The 5-(S)-isomer was synthesized from the 5-(R)-isomer 3 by Mitsunobu reaction. The 5′-(R)—C-Me-modified A, G, and C were used to modify a hammerhead ribozyme. The modified ribozyme had activity similar to that of the wild-type ribozyme.

[chemical structure]

[chemical structure]

[0886] The reagents and conditions used for Scheme 38 are: (i) 1) TMSCl/Pyridine, 0° C. to R.T., 1 h. 2) i-BuCl/Pyridine, 0° C. to R.T., overnight; 93%. (ii) Dess-Martin periodinane/DCM, 0° C. to R.T., 2 h. (iii) MeMgBr/DCM, 0° C., 30 min; 2 steps 33% as a mixture of 9 and 19. 9 and 19 are inseparable. (iv) TBDPSCl, Imidazole/DMF, R.T., overnight; 17% for 10 and 23% for 20.

[0887] The structural result from molecular modeling of 5′-C-methyl-nucleoside within oligonucleotides is shown by FIG. 23. As shown in FIG. 23, The (R)-isomer juts into a polar region of negative electrostatic polarization that is heavily hydrated (cyan spheres) and interferes (flash) with phosphate hydration and engages in steric clash with the phosphate backbone (arrows). Perturbation due to the steric effect of the methyl group is more significant in the (R)-isomer than the (S)-isomer.

### Example 10: Effect of the 5′-C-Methyl Guanosine Modification on 5′-Nuclease and 3′-Nuclease Stability

[0888] 5′-Nuclease Stability:_To evaluate the 5′-exonuclease stability of enantiomerically pure (R)- and (S)-5′-C-methyl (C5′-Me) Guanosine substituted nucleosides a dT20 template sequence (“dT20” disclosed as SEQ ID NO: 1) was modified at the 5′-end with one modified nucleotide via PO or PS linkages (Table 13). The structures of the compounds are shown below with guanosine for comparison.

[chemical structure]

[0889] A dT20 template (“dT20” disclosed as SEQ ID NO: 1) having 5′end dT with PS linkages and 5′end Guanosine (G) with either PO or PS linkages were used as the control. ONs were incubated with Phosphodiesterase-II (500 mU/mL), and the half-life (T½) of each modified ON was determined by HPLC-based quantification of the full-length ON as a function of time. The results are summarized in Table 13 and HPLC stability profiles are depicted in FIGS. 24A and 24B showing decay curve of dT20 (SEQ ID NO: 1) modified at the 5′ end with Guanosine and (R) or (S)-5′-C-methyl Guanosine (C5′-MeG) with PO or PS linkages upon incubation with 5′ exonucleases-phosphodiesterase-II as a function of time. FIG. 24A is for the following conditions: a) enzyme conc. 500 mU/mL, Oligo Conc. 0.1 mg/mL, 50 mM NaOAc (pH-6.5):10 Mm MgCl₂. FIG. 24B is for the following conditions: enzyme conc. 100 mU/mL, Oligo Conc. 0.1 mg/mL, 50 mM NaOAc (pH-6.5):10 mM MgCl₂. The percentage full length ON is calculated by dividing the area under the peak corresponding to full length ON at a given time point by the full length at t=0 and multiplied by 100.

[0890] All the ONs attached via PO linkage to the 5′-end of dT19 (SEQ ID NO: 9) are found to be less stable compare to dT residue with PS linkages and were degraded by the first time point upon incubation with PE-II. All the ONs with Guanine at 5′end was more stable compare to dTpsdT19. ONs modified with a single (R)-5′Me-G linked by a PS does not showed any degradation till 24 h while (S)-5′-C-methyl-G were more stable compare to control G, with T½ values of 72 and 41 h, respectively. To find out the stability difference between the (R) and (S)-5′-C-methyl isomers linked through PO bond we carried out the similar experiment with reduced concentration of PE-II (100 mU/mL). The results are summarized in Table 13 and HPLC stability profiles are depicted in FIG. 24B. A similar trend was observed for (R)- and (S)-5′-C-Me-Guanosine and control G. The G and (S)-5′-C-methyl-G isomers were degraded by the first time point upon incubation with reduced conc of PE-II while the (R)-5′-C-methyl-G isomer was stable with T½ value 4.3 hr. The dTpsdT19 is most stable oligo at this reduced concentration with T½ value 53 h.

TABLE 13
Half-lives (T_{1/2}) of 5′-End-Modified dT18-mer (″dT18″ disclosed as SEQ ID NO: 2) in the
Presence of Phosphodiesterase-II (Table 13 discloses SEQ ID NOS 65-71, respectively, in order
of appearance)

| Sr.No | Code | Sequence | ty2 (h) | t12 (h) |
|---|---|---|---|---|
| 1 | dTpsdT19 | dTsdTdTdTdTdTdTdTdTdTdTdTdTdTdTdTdTdTdTdT | 4.0 | 52 |
| 2 | GpodT19 | GdTdTdTdTdTdTdTdTdTdTdTdTdTdTdTdTdTdTdT | <1 | <1 |
| 3 | SpodT19 | (G5m)dTdTdTdTdTdTdTdTdTdTdTdTdTdTdTdTdTdTdT | <1 | <1 |
| 4 | RpodT19 | (G5mR)dTdTdTdTdTdTdTdTdTdTdTdTdTdTdTdTdTdTdT | <1 | 4.3 |
| 6 | GpsdT19 | GsdTdTdTdTdTdTdTdTdTdTdTdTdTdTdTdTdTdTdT | 41 | |
| 7 | RpsdT19 | (G5mRs)dTdTdTdTdTdTdTdTdTdTdTdTdTdTdTdTdTdTdT | No | |
| | | | degradation | |
| 8 | SpsdT19 | (G5ms)dTdTdTdTdTdTdTdTdTdTdTdTdTdTdTdTdTdTdT | 66 | |

[0891] 3′-Nuclease Stability: To evaluate the 3′-exonuclease stability of enantiomerically pure (R)- and (S)-5′-C-methyl (C5′-Me) Guanosine substituted nucleosides a dT20 template sequence (“dT20” disclosed as SEQ ID NO: 1) was modified at the 3′-end with either one or two modified nucleotides via PO or PS linkages (Table 13). A dT20 template (“dT20” disclosed as SEQ ID NO: 1) having 3′end dT with PS linkages and 3′end Guanosine (G) with either PO or PS linkages were used as the control. ONs were incubated with SVPD (Phosphodiesterase-I) (75 mU/mL) in presence of 50 mM Tris-HCl (pH-7.2):10 mM MgCl₂, and the half-life (T_{1/2}) of each modified ON was determined by HPLC-based quantification of the full-length ON as a function of time. The results are summarized in Table 13 and HPLC stability profiles are depicted in FIGS. 25A and 25B. FIGS. 25A and 25B show the HPLC stability profiles of dT20 modified (“dT20” disclosed as SEQ ID NO: 1) at the 3′ end with Guanosine and (R) or (S)-5′-C-methyl Guanosine (C5′-MeG) upon incubation with snake venom phosphodiesterase as a function of time. FIG. 25A if for a single incorporation with PO or PS linkage between dT and modified nucleosides and FIG. 25B is for a double incorporation with PO and PS linkages between the two modified nucleosides.

[0892] Compared to dT₂₀ (SEQ ID NO: 1) modified at the 3′ end with 2′-F—U-2′-F—U, 5′-(S)—C-Me-2′-F—U and 5′-(R)—C-Me-2′-F—U imparted more resistant to 3′-exonuclease. The (S) isomer was more resistant than the (R) isomer [Kel'in, A. V.; Zlatev, I.; Harp, J.; Jayaraman, M.; Bisbe, A.; O'Shea, J.; Taneja, N.; Manoharan, R. M.; Khan, S.; Charisse, K.; Maier, M. A.; Egli, M.; Rajeev, K. G.; Manoharan, M. The Journal of Organic Chemistry 2016, 81, 2261]. 5′-(S)—C-Me-G, and 5′-(R)—C-Me-G were reported by Beigelman et al. and modified ribozyme activity was evaluated [Beigelman, L.; Karpeisky, A.; Usman, N. Nucleosides and Nucleotides 1995, 14, 901]. The utility of this modification in siRNA using guanine as an example was evaluated. FIG. 26 show the HPLC analysis results of dT₁₈ modified (“dT₁₈” disclosed as SEQ ID NO: 2) at the 3′ end with two 5′-(R)—C-Me-2′-F—U or 5′-(S)—C-Me-2′-F—U nucleotides (structures shown below) upon incubation with snake venom phosphodiesterase as a function of time. There was a phosphorothioate (PS) linkage between dT and the modified nucleotides.

[chemical structure]

TABLE 14
(Table 14 discloses SEQ ID NOS 72-84, respectively, in order of appearance)

| Sr.No | Code | Sequence | t_{1/2} (h) |
|---|---|---|---|
| 1 | dT19psdT | dTdTdTdTdTdTdTdTdTdTdTdTdTdTdTdTdTdTdTsdT | 13.4 |
| 2 | dT19poG | dTdTdTdTdTdTdTdTdTdTdTdTdTdTdTdTdTdTdTG | <1 |
| 3 | dT19poR | dTdTdTdTdTdTdTdTdTdTdTdTdTdTdTdTdTdTdT(G5mR) | 7.1 |
| 4 | dT19poS | dTdTdTdTdTdTdTdTdTdTdTdTdTdTdTdTdTdTdT(G5m) | 70.7 |
| 6 | dTpsG | dTdTdTdTdTdTdTdTdTdTdTdTdTdTdTdTdTdTdTsG | 14.4 |
| 7 | dT19psS | dTdTdTdTdTdTdTdTdTdTdTdTdTdTdTdTdTdTdTs(G5m) | No degredation |
| 8 | dT19PSR | dTdTdTdTdTdTdTdTdTdTdTdTdTdTdTdTdTdTdTs(G5mR) | 22.6 |
| 9 | dT19GpoG | dTdTdTdTdTdTdTdTdTdTdTdTdTdTdTdTdTdTGG | <1 |
| 10 | dT19RpoR | dTdTdTdTdTdTdTdTdTdTdTdTdTdTdTdTdTdT(G5mR)(G5mR) | 20.8 |
| 11 | dT19SpoS | dTdTdTdTdTdTdTdTdTdTdTdTdTdTdTdTdTdT(G5m)(G5m) | 260 |
| 12 | dTGpsG | dTdTdTdTdTdTdTdTdTdTdTdTdTdTdTdTdTdTGsG | 65.5 |
| 13 | dT19SpsS | dTdTdTdTdTdTdTdTdTdTdTdTdTdTdTdTdTdT(G5mS)(G5m) | No degredation |
| 14 | dT19RPSR | dTdTdTdTdTdTdTdTdTdTdTdTdTdTdTdTdTdT(G5mRS)(G5mR) | 89 |

[0893] Building blocks derived from specific (R)-isomer and (S)-isomer intermediates: Scheme 39 shows Building blocks derived from (R)-isomer intermediate 10 and (S)-isomer intermediate 20. The reagents and conditions used in the scheme are: (i) 80% aq. TFA/DCM, 0° C. to R.T., overnight; 83% for 11, 70% for 21. (ii) Bz₂O, DMAP/Pyridine, R.T., overnight; 99% fro 12, 22. (iii) 1 M TBAF in THF/THF, R.T., overnight; 87% for 13, 94% for 23. (iv) DMTrCl, AgNO₃/Pyridine-THF, R.T., overnight; 98% for 14, 98% for 24. (v) 1 M NaOH in H₂O/THF-MeOH—H₂O, 0° C., 30 min; 96% for 15, 25. (vi) TBSCl, AgNO₃/THF-Pyridine, R.T., overnight; 50% for 16, 53% for 26. (vii) i-Pr₂NP(Cl)O(CH₂)₂CN, DIPEA, 1-Methylimidazole/DCM, R.T., 2 h; 88% for 17, 65% for 27. (viii) 1) Succinic anhydride, DMAP/DCM, R.T., overnight. 2) LCAA-CPG (pore size 500 Å NH₂, 171 μmol/g), HBTU, DIPEA/DMF, R.T., overnight. 3) Ac₂O/Pyridine, R.T., overnight; loading: 70 μmol/g for 18, 97 μmol/g for 28. Table 15 gives estimated percentages of C3′-endo conformers based on ¹H-NMR ³J_{H-H} coupling constants calculated as 100-10×³J_{H1′-H2′}.

TABLE 15
estimated percentages of C3′ -endo conformers.

| | ³J_{H1′-H2′} (Hz) | % N (C3′-endo) |
|---|---|---|
| 11 | 6.60 | ~30 |
| 21 | 5.30 | ~50 |

[chemical structure]

[0894] Assignment of configurations:_The assignment of configuration was done using the Principle of Mosher Ester (MTPA) Analysis [Hoye, T. R.; Jeffrey, C. S.; Shao, F. Nature Protocols 2007, 2, 2451].

[0895] The 5′-(R) assignment using MTPA is shown by scheme 40. The reagents and conditions used in scheme 40 were: (i) 1 M TBAF in THF/THF, R.T., overnight; 82%. (ii) (R)-(−)-MTPACl/DCM-Pyridine, 0° C. to R.T., 2 h; 72%. (iii) (S)-(+)-MTPACl/DCM-Pyridine, 0° C. to R.T., 2 h; 38%. The conformations used for the analysis of the (S)- and (R)-MTPA esters 29 and 30 are shown by FIG. 27. The results are tabulated in Table 16.

[chemical structure]

TABLE 16
Dd^{SR} data for the (S)- and (R)-MTPA esters 29 and 30

| | 29 | 30 | Dd^{SR} (=d_{S} − d_{R}) | |
|---|---|---|---|---|
| | d (S)-Mosher ester | d (R)-Mosher ester | ppm | Hz (400 MHz) |
| 3′H | 4.98 | 5.12 | −0.14 | −56 |
| 4′H | 4.03 | 4.09 | −0.06 | −24 |
| 1′H | 6.02 | 6.07 | −0.05 | −20 |
| 2′H | 5.35 | 5.37 | −0.02 | −8 |
| 5′H | 5.24 | 5.24 | 0 | 0 |
| 5′Me | 1.23 | 1.13 | 0.1 | 40 |

[0896] The 5′-(S) assignment using MTPA is shown by scheme 41. The reagents and conditions used in scheme 41 were: (i) 1 M TBAF in THF/THF, R.T., overnight; 78%. (ii) (R)-(−)-MTPACl/DCM-Pyridine, 0° C. to R.T., 2 h; 31%. (iii) (S)-(+)-MTPACl/DCM-Pyridine, 0° C. to R.T., 2 h; 51%. The conformations used for the analysis of the (S)- and (R)-MTPA esters 31 and 32 are shown by FIG. 28. The results are tabulated in Table 17.

[chemical structure]

TABLE 17
Dd^{SR} data data for the (S)- and (R)-MTPA esters 31 and 32.

| | 31 | 32 | Dd^{SR} (=d_{S} − d_{R}) | |
|---|---|---|---|---|
| | d (S)-Mosher ester | d (R)-Mosher ester | ppm | Hz (400 MHz) |
| 3′H | 5.24 | 4.80 | 0.44 | 176 |
| 4′H | 4.10 | 4.13 | −0.03 | −12 |
| 1′H | 6.19 | 6.03 | 0.16 | 64 |
| 2′H | 5.33 | 5.08 | 0.25 | 100 |
| 5′H | 5.33 | 5.29 | 0.04 | 16 |
| 5′Me | 1.26 | 1.35 | −0.09 | −36 |

### Example 11: Evaluation of (R)- and/or (S)-Isomers as RNA Polymerase Substrates

[0897] Triphosphate synthesis: Triphosphates were synthesized as shown by Scheme 42 [Zlatev, I.; Lackey, J. G.; Zhang, L.; Dell, A.; McRae, K.; Shaikh, S.; Duncan, R. G.; Rajeev, K. G.; Manoharan, M. Bioorganic & Medicinal Chemistry 2013, 21, 722.]. The reagents and conditions for scheme 42 were: (i)-(iii) were performed on ABI-394 synthesizer following Table 19. (iv) 1) NH₄OH/EtOH, R.T., overnight. 2) 1 M TBAF/THF, R.T., overnight. 3) AMA/H₂O, R.T., overnight.; 28% for 34 and 39% for 38. Table 18 lists the estimated percentages of C3′-endo conformers based on ¹H-NMR ³J_{H-H} coupling constants calculated as 100-10×³J_{H1′-H2′}. Table 19 lists ABI-394 protocol.

TABLE 18
Estimated percentages of C3′ -endo conformers

| | ³J_{H1′-H2′} (Hz) | % N (C3′-endo) |
|---|---|---|
| 34 | 7.04 | ~30 |
| 38 | 6.08 | ~40 |

TABLE 19
ABI-394 protocol

| | | Delivery | Wait |
|---|---|---|---|
| Reaction | Reagent | time (sec) | time (sec) |
| i (1) | 1M Diphenyl phosphite/Pyridine | 30 + 10 × 2 | 150 × 2 + 300 |
| i (2) | 0.1M TEAB/H₂O—CH₃CN | 30 + 10 × 5 | 60 × 2 + 450 × 4 |
| ii | 1M Imidazole, 1M BSA/ | 30 + 10 × 6 | 60 × 2 + 1800 × 5 |
| | CBrCl₃—CH₃CN—NEt₃ | | |
| iii | 0.25M Tributylammonium | 30 × 2 + 15 × 2 | 300 × 4 + 18000 |
| | pyrophosphate/DMF—ACN | | |

[chemical structure]

[0898] 5′-(R)- and (S)—C-Me-guanosine triphosphate Evaluations: 5′-(R)- and (S)—C-Me-guanosine triphosphate were evaluated with Pol-RMT and DNA Pol-γ. Mitochondrial toxicity is a common feature with nucleoside analog drugs (liver/metabolic effects, myopathies, peripheral neuropathy). Replication of mitochondria occurs during all phases of cell cycle, including post-mitotic cells. Mito replication in post-mitotic cells becomes preferential consumer of endogenous nucleotide pools. Mitochondrial polymerases (pol-γ, Pol-RMT) have limited exonuclease (proofreading) capability. Alterations/effects to nuclear DNA more likely to manifest in other test systems. FIG. 29 shows the DNA Pol-γ and Pol-RMT protocol schematically. As shown in FIG. 29, Atto-425 labeled primers allow for high sensitivity fluorescence detection with very low reaction volumes. Analytical IEX-HPLC with fluorescence detection for optimal resolution of primer-extended products is used to detect—especially important in competition mixtures. This assays was applied for the assessment of incorporation efficiencies.

[0899] FIG. 30 shows the incorporation assay results by Pol-RMT. 5′-(S)—C-Me-G triphosphate (GTP) incorporates in Pol-RMT at high concentrations, while 5′-(R)—C-Me-GTP appears not incorporate in Pol-RMT. The reaction conditions were; 200 nM template, 50 nM primer, 300 nM enzyme and 1 mM or 100 μM NTPs, 30 min, 35° C.

[0900] FIG. 31 shows the incorporation assay results by Pol-γ. Neither 5′-(S) nor (R)—C-Me-Gtp incorporate in Pol-γ at high concentrations. The reaction conditions were: Reaction: 100 nM template, 100 nM primer, 40 Units of enzyme and 1 mM or 100 μM dNTPs, 30 min, 37° C.; diluted to 5 nM primer and analyzed by FLD-IEX-HPLC (Ex: 437, Em: 483 nm).

### Example 12

[0901] Oligo Synthesis and characterization of mUNA: RNA oligonucleotides bearing modified nucleosides described here can be synthesized on an ABI 394 DNA/RNA synthesizer using standard phosphoramidite chemistry with commercially available 5′-O-(4,4′-dimethoxytrityl)-3′-O-(2-cyanoethyl-N,N-diisopropyl) phosphoramidite monomers of uridine (U), 4-N-acetylcytidine (C^{A}c), 6-N-benzoyladenosine (A^{Bz}) and 2-N-isobutyrylguanosine (G^{iBu}) with 2′-O-t-butyldimethylsilyl protected phosphoramidites, 2′-fluoro substituted phosphoramidites, 2′-O-methyl phosphoramidites and the modified nucleoside building blocks shown here. After synthesis, a small portion of the oligonucleotide-bound CPG is treated with 100 μL of methylamine solution (40 wt % in water, Aldrich) in a microtube (1 mL) at 65° C. for 10 min or concentrated ammonium hydroxide at 55° C. for 8 hours. The mixture is cooled on dry ice for 5 min and the solid suspension is spun down. The supernatant (80 L) is decanted into another microtube and heated with 120 μL of TEA·3HF (Lancaster Synthesis, Inc.) at 65° C. for 12 min. The purity of crude oligonucleotide is analyzed by RP-HPLC or IEX-HPLC and the mass is confirmed by LC-MS experiments. FIG. 32 shows mUNA monomer structures.

TABLE 20
Oligo Synthesis and characterization of mUNA for Tm study (Table 20 discloses SEQ
ID NOS 85-104, respectively, in order of appearance)

| Oligo ID | Oligo Sequence | Molecular Weight | Observed Mass |
|---|---|---|---|
| A-126502 | UACAGUCUAUGU | 3757.27 | 3755.5 |
| A-126504 | dTdAdCdAdGdTdCdTdAdTdGdT | 3635.402 | 3633.6 |
| A-235396 | dTdAdCdAdG(Uun)dCdTdAdTdGdT | 3639.391 | 3637.6 |
| A-235403 | UACAG(Uun)CUAUGU | 3759.286 | 3757.5 |
| A-637538 | UACAGY95CUAUGU | 3773.314 | 3771.5 |
| A-637539 | dTdAdCdAdGY95dCdTdAdTdGdT | 3653.419 | 3651.7 |
| A-637540 | UACAGY96CUAUGU | 3773.314 | 3771.5 |
| A-637541 | dTdAdCdAdGY96dCdTdAdTdGdT | 3653.419 | 3651.7 |
| A-637542 | UACAGY97CUAUGU | 3773.314 | 3771.5 |
| A-637543 | dTdAdCdAdGY97dCdTdAdTdGdT | 3653.419 | 3651.7 |
| A-637544 | UACAGY98CUAUGU | 3773.314 | 3771.5 |
| A-637545 | dTdAdCdAdGY98dCdTdAdTdGdT | 3653.419 | 3651.7 |
| A-637546 | UACAGY99CUAUGU | 3773.314 | 3771.5 |
| A-637547 | dTdAdCdAdGY99dCdTdAdTdGdT | 3653.419 | 3651.7 |
| A-637548 | UACAGY100CUAUGU | 3773.314 | 3771.5 |
| A-637549 | dTdAdCdAdGY100dCdTdAdTdGdT | 3653.419 | 3651.7 |
| A-637550 | UACAGY101CUAUGU | 3789.314 | 3787.5 |
| A-637551 | dTdAdCdAdGY101dCdTdAdTdGdT | 3669.419 | 3667.6 |
| A-637552 | UACAGY102CUAUGU | 3773.314 | 3771.5 |
| A-637553 | dTdAdCdAdGY102dCdTdAdTdGdT | 3653.419 | 3651.7 |

TABLE 21
Oligo Synthesis and characterization of mUNA for 5′-exo study (Table 21 discloses SEQ
ID NOS 105-122, respectively, in order of appearance)

| Oligo ID | oligo Sequence | Molecular Weight | Observed Mass |
|---|---|---|---|
| A-637472 | Y95dTdTdTdTdTdTdTdTdTdTdTdTdTdTdTdTdTdTdT | 6039.917 | 6036.97 |
| A-637473 | Y95sdTdTdTdTdTdTdTdTdTdTdTdTdTdTdTdTdTdTdT | 6055.977 | 6052.94 |
| A-637480 | Y96dTdTdTdTdTdTdTdTdTdTdTdTdTdTdTdTdTdTdT | 6039.917 | 6036.98 |
| A-637481 | Y96sdTdTdTdTdTdTdTdTdTdTdTdTdTdTdTdTdTdTdT | 6055.977 | 6052.9 |
| A-637488 | Y97dTdTdTdTdTdTdTdTdTdTdTdTdTdTdTdTdTdTdT | 6039.917 | 6037.1 |
| A-637489 | Y97sdTdTdTdTdTdTdTdTdTdTdTdTdTdTdTdTdTdTdT | 6055.977 | 6052.9 |
| A-637496 | Y98dTdTdTdTdTdTdTdTdTdTdTdTdTdTdTdTdTdTdT | 6039.917 | 6036.97 |
| A-637497 | Y98sdTdTdTdTdTdTdTdTdTdTdTdTdTdTdTdTdTdTdT | 6055.977 | 6052.9 |
| A-637504 | Y99dTdTdTdTdTdTdTdTdTdTdTdTdTdTdTdTdTdTdT | 6039.917 | 6036.9 |
| A-637505 | Y99sdTdTdTdTdTdTdTdTdTdTdTdTdTdTdTdTdTdTdT | 6055.977 | 6052.9 |
| A-637512 | Y100dTdTdTdTdTdTdTdTdTdTdTdTdTdTdTdTdTdTdT | 6039.917 | 6036.9 |
| A-637513 | Y100sdTdTdTdTdTdTdTdTdTdTdTdTdTdTdTdTdTdTdT | 6055.977 | 6052.9 |
| A-637520 | Y101dTdTdTdTdTdTdTdTdTdTdTdTdTdTdTdTdTdTdT | 6055.917 | 6052.97 |
| A-637521 | Y101sdTdTdTdTdTdTdTdTdTdTdTdTdTdTdTdTdTdTdT | 6071.977 | 6068.9 |
| A-637528 | Y102dTdTdTdTdTdTdTdTdTdTdTdTdTdTdTdTdTdTdT | 6039.917 | 6036.98 |
| A-637529 | Y102sdTdTdTdTdTdTdTdTdTdTdTdTdTdTdTdTdTdTdT | 6055.978 | 6052.95 |
| A-637536 | (Uun)dTdTdTdTdTdTdTdTdTdTdTdTdTdTdTdTdTdTdT | 6025.889 | 6022.96 |
| A-637537 | (Uuns)dTdTdTdTdTdTdTdTdTdTdTdTdTdTdTdTdTdTdT | 6041.954 | 6038.94 |

TABLE 22
Oligo Synthesis and characterization of mUNA for 3′-exo study (Table 22 discloses SEQ
ID NOS 123-176, respectively, in order of appearance)

| Oligo ID | Oligo Sequence | Molecular Weight | Observed Mass |
|---|---|---|---|
| A-637466 | dTdTdTdTdTdTdTdTdTdTdTdTdTdTdTdTdTdTdTY95 | 6039.917 | 6036.98 |
| A-637467 | dTdTdTdTdTdTdTdTdTdTdTdTdTdTdTdTdTdTdTsY95 | 6055.983 | 6052.96 |
| A-637468 | dTdTdTdTdTdTdTdTdTdTdTdTdTdTdTdTdTdTY95Y95 | 6057.934 | 6054.99 |
| A-637469 | dTdTdTdTdTdTdTdTdTdTdTdTdTdTdTdTdTdTY95sY95 | 6073.994 | 6070.96 |
| A-637470 | dTdTdTdTdTdTdTdTdTdTdTdTdTdTdTdTdTdTY95dT | 6039.917 | 6036.98 |
| A-637471 | dTdTdTdTdTdTdTdTdTdTdTdTdTdTdTdTdTdTY95sdT | 6055.977 | 6052.95 |
| A-637474 | dTdTdTdTdTdTdTdTdTdTdTdTdTdTdTdTdTdTdTY96 | 6039.917 | 6036.98 |
| A-637475 | dTdTdTdTdTdTdTdTdTdTdTdTdTdTdTdTdTdTdTsY96 | 6055.983 | 6052.96 |
| A-637476 | dTdTdTdTdTdTdTdTdTdTdTdTdTdTdTdTdTdTY96Y96 | 6057.934 | 6054.99 |
| A-637477 | dTdTdTdTdTdTdTdTdTdTdTdTdTdTdTdTdTdTY96sY96 | 6073.994 | 6070.96 |
| A-637478 | dTdTdTdTdTdTdTdTdTdTdTdTdTdTdTdTdTdTY96dT | 6039.917 | 6036.98 |
| A-637479 | dTdTdTdTdTdTdTdTdTdTdTdTdTdTdTdTdTdTY96sdT | 6055.977 | 6052.95 |
| A-637482 | dTdTdTdTdTdTdTdTdTdTdTdTdTdTdTdTdTdTdTY97 | 6039.917 | 6036.98 |
| A-637483 | dTdTdTdTdTdTdTdTdTdTdTdTdTdTdTdTdTdTdTsY97 | 6055.983 | 6052.96 |
| A-637484 | dTdTdTdTdTdTdTdTdTdTdTdTdTdTdTdTdTdTY97Y97 | 6057.934 | 6054.99 |
| A-637485 | dTdTdTdTdTdTdTdTdTdTdTdTdTdTdTdTdTdTY97sY97 | 6073.994: | 6070.96 |
| A-637486 | dTdTdTdTdTdTdTdTdTdTdTdTdTdTdTdTdTdTY97dT | 6039.917 | 6036.98 |
| A-637487 | dTdTdTdTdTdTdTdTdTdTdTdTdTdTdTdTdTdTY97sdT | 6055.977 | 6052.95 |
| A-637490 | dTdTdTdTdTdTdTdTdTdTdTdTdTdTdTdTdTdTdTY98 | 6039.917 | 6036.98 |
| A-637491 | dTdTdTdTdTdTdTdTdTdTdTdTdTdTdTdTdTdTdTsY98 | 6055.983 | 6052.96 |
| A-637492 | dTdTdTdTdTdTdTdTdTdTdTdTdTdTdTdTdTdTY98Y98 | 6057.934 | 6054.99 |
| A-637493 | dTdTdTdTdTdTdTdTdTdTdTdTdTdTdTdTdTdTY98sY98 | 6073.994 | 6070.96 |
| A-637494 | dTdTdTdTdTdTdTdTdTdTdTdTdTdTdTdTdTdTY98dT | 6039.917 | 6036.98 |
| A-637495 | dTdTdTdTdTdTdTdTdTdTdTdTdTdTdTdTdTdTY98sdT | 6055.977 | 6052.95 |
| A-637498 | dTdTdTdTdTdTdTdTdTdTdTdTdTdTdTdTdTdTdTY99 | 6039.917 | 6036.98 |
| A-637499 | dTdTdTdTdTdTdTdTdTdTdTdTdTdTdTdTdTdTdTsY99 | 6055.983 | 6052.96 |
| A-637500 | dTdTdTdTdTdTdTdTdTdTdTdTdTdTdTdTdTdTY99Y99 | 6057.934 | 6054.99 |
| A-637501 | dTdTdTdTdTdTdTdTdTdTdTdTdTdTdTdTdTdTY99sY99 | 6073.994 | 6070.96 |
| A-637502 | dTdTdTdTdTdTdTdTdTdTdTdTdTdTdTdTdTdTY99dT | 6039.917 | 6036.98 |
| A-637503 | dTdTdTdTdTdTdTdTdTdTdTdTdTdTdTdTdTdTY99sdT | 6055.977 | 6052.95 |
| A-637506 | dTdTdTdTdTdTdTdTdTdTdTdTdTdTdTdTdTdTdTY100 | 6039.917 | 6036.98 |
| A-637507 | dTdTdTdTdTdTdTdTdTdTdTdTdTdTdTdTdTdTdTsY100 | 6055.983 | 6052.96 |
| A-637508 | dTdTdTdTdTdTdTdTdTdTdTdTdTdTdTdTdTdTY100Y100 | 6057.934 | 6054.99 |
| A-637509 | dTdTdTdTdTdTdTdTdTdTdTdTdTdTdTdTdTdTY100sY100 | 6073.994 | 6070.96 |
| A-637510 | dTdTdTdTdTdTdTdTdTdTdTdTdTdTdTdTdTdTY100dT | 6039.917 | 6036.98 |
| A-637511 | dTdTdTdTdTdTdTdTdTdTdTdTdTdTdTdTdTdTY100sdT | 6055.977 | 6052.95 |
| A-637514 | dTdTdTdTdTdTdTdTdTdTdTdTdTdTdTdTdTdTdTY101 | 6055.917 | 6052.97 |
| A-637515 | dTdTdTdTdTdTdTdTdTdTdTdTdTdTdTdTdTdTdTsY101 | 6071.983 | 6068.95 |
| A-637516 | dTdTdTdTdTdTdTdTdTdTdTdTdTdTdTdTdTdTY101Y101 | 6089.934 | 6086.97 |
| A-637517 | dTdTdTdTdTdTdTdTdTdTdTdTdTdTdTdTdTdTY101sY101 | 6105.994 | 6102.95 |
| A-637518 | dTdTdTdTdTdTdTdTdTdTdTdTdTdTdTdTdTdTY101dT | 6055.917 | 6052.97 |
| A-637519 | dTdTdTdTdTdTdTdTdTdTdTdTdTdTdTdTdTdTY101sdT | 6071.977 | 6068.95 |
| A-637522 | dTdTdTdTdTdTdTdTdTdTdTdTdTdTdTdTdTdTdTY102 | 6039.917 | 6036.98 |
| A-637523 | dTdTdTdTdTdTdTdTdTdTdTdTdTdTdTdTdTdTdTsY102 | 6055.983 | 6052.95 |
| A-637524 | dTdTdTdTdTdTdTdTdTdTdTdTdTdTdTdTdTdTY102Y102 | 6057.934 | 6054.99 |
| A-637525 | dTdTdTdTdTdTdTdTdTdTdTdTdTdTdTdTdTdTY102sY102 | 6073.995 | 6070.96 |
| A-637526 | dTdTdTdTdTdTdTdTdTdTdTdTdTdTdTdTdTdTY102dT | 6039.917 | 6036.98 |
| A-637527 | dTdTdTdTdTdTdTdTdTdTdTdTdTdTdTdTdTdTY102sdT | 6055.978 | 6052.95 |
| A-637530 | dTdTdTdTdTdTdTdTdTdTdTdTdTdTdTdTdTdTdT(Uun) | 6025.889 | 6022.96 |
| A-637531 | dTdTdTdTdTdTdTdTdTdTdTdTdTdTdTdTdTdTdTs(Uun) | 6041.955 | 6038.94 |
| A-637532 | dTdTdTdTdTdTdTdTdTdTdTdTdTdTdTdTdTdT(Uun)(Uun) | 6029.878 | 6026.95 |
| A-637533 | dTdTdTdTdTdTdTdTdTdTdTdTdTdTdTdTdTdT(Uuns)(Uun) | 6045.943 | 6042.93 |
| A-637534 | dTdTdTdTdTdTdTdTdTdTdTdTdTdTdTdTdTdT(Uun)dT | 6025.889 | 6022.96 |
| A-637535 | dTdTdTdTdTdTdTdTdTdTdTdTdTdTdTdTdTdT(Uuns)dT | 6041.954 | 6038.94 |

TABLE 23
Oligo Synthesis and characterization of mUNA for in vitro study (Table 23 discloses
SEQ ID NOS 177-202, respectively, in order of appearance)

| oligo ID | oligo Sequence | Molecular Weight | Observed Mass |
|---|---|---|---|
| A-173611 | usGfsuu(Tgn)auagagcaAfgAfacacusgsu | 7649.155 | 7645.2 |
| A-173769 | usGfsuuua(Tgn)agagcaAfgAfacacusgsu | 7649.155 | 7645.2 |
| A-173780 | asCfsacgg(Tgn)uuauagAfgCfaagaascsa | 7694.25 | 7690.3 |
| A-265018 | usGfsuu(Uun)auagagcaAfgAfacacusgsu | 7695.181 | 7691.2 |
| A-265020 | usGfsuuua(Uun)agagcaAfgAfacacusgsu | 7695.181 | 7691.2 |
| A-265053 | asCfsacgg(Uun)uuauagAfgCfaagaascsa | 7740.276 | 7736.3 |
| A-432461 | asCfsacggY95uuauagAfgCfaagaascsa | 7754.304 | 7750.3 |
| A-432462 | asCfsacggY97uuauagAfgCfaagaascsa | 7754.304 | 7750.3 |
| A-432463 | asCfsacggY96uuauagAfgCfaagaascsa | 7754.304 | 7750.3 |
| A-432464 | asCfsacggY98uuauagAfgCfaagaascsa | 7754.304 | 7750.3 |
| A-432465 | asCfsacggY99uuauagAfgCfaagaascsa | 7754.304 | 7750.3 |
| A-432466 | asCfsacggY100uuauagAfgCfaagaascsa | 7754.304 | 7750.3 |
| A-432468 | usGfsuuY95auagagcaAfgAfacacusgsu | 7709.209 | 7705.2 |
| A-432469 | usGfsuuY97auagagcaAfgAfacacusgsu | 7709.209 | 7705.2 |
| A-432470 | usGfsuuY96auagagcaAfgAfacacusgsu | 7709.209 | 7705.2 |
| A-432471 | usGfsuuY98auagagcaAfgAfacacusgsu | 7709.209 | 7705.2 |
| A-432472 | usGfsuuY99auagagcaAfgAfacacusgsu | 7709.209 | 7705.2 |
| A-432473 | usGfsuuY100auagagcaAfgAfacacusgsu | 7709.209 | 7705.2 |
| A-432474 | usGfsuuY101auagagcaAfgAfacacusgsu | 7725.209 | 7721.2 |
| A-432475 | usGfsuuuaY95agagcaAfgAfacacusgsu | 7709.209 | 7705.2 |
| A-432476 | usGfsuuuaY97agagcaAfgAfacacusgsu | 7709.209 | 7705.2 |
| A-432477 | usGfsuuuaY96agagcaAfgAfacacusgsu | 7709.209 | 7705.2 |
| A-432478 | usGfsuuuaY98agagcaAfgAfacacusgsu | 7709.209 | 7705.2 |
| A-432479 | usGfsuuuaY99agagcaAfgAfacacusgsu | 7709.209 | 7705.2 |
| A-432480 | usGfsuuuaY100agagcaAfgAfacacusgsu | 7709.209 | 7705.2 |
| A-432481 | usGfsuuuaY101agagcaAfgAfacacusgsu | 7725.209 | 7721.2 |

TABLE 24
Oligo Synthesis and characterization of TNA for Tm study (Table 24 discloses SEQ ID
NOS 203-210, respectively, in order of appearance)

| Oligo ID | Oligo Sequence | Molecular Weight | Observed Mass |
|---|---|---|---|
| A-140220 | UACAG(Tth)CUAUGU | 3741.272 | 3739.5 |
| A-140221 | dTdAdCdAdG(Tth)dCdTdAdTdGdT | 3621.377 | 3619.6 |
| A-144735 | UACAGU(Cth)UAUGU | 3741.273 | 3739.5 |
| A-815960 | ACAUA(Gth)ACUGUA | 3773.322 | 3771.6 |
| A-815961 | ACAUAG(Ath)CUGUA | 3773.327 | 3771.6 |
| A-815962 | dAdCdAdTdA(Gth)dAdCdTdGdTdA | 3639.406 | 3637.7 |
| A-815963 | dAdCdAdTdAdG(Ath)dCdTdGdTdA | 3639.406 | 3637.7 |
| A-1036755 | dTdAdCdAdGdT(Cth)dTdAdTdGdT | 3635.404 | 3633.7 |

TABLE 25
Oligo Synthesis and characterization of TNA for 5′/3′-exo study (Table 25 discloses
SEQ ID NOS 211-216, respectively, in order of appearance)

| | | Molecular | Observed |
|---|---|---|---|
| Oligo ID | Oligo Sequence | Weight | Mass |
| A-140216 | dTdTdTdTdTdTdTdTdTdTdTdTdTdTdTdTdTdT(Tths)(Tth) | 6009.911 | 6006.9 |
| A-140217 | dTdTdTdTdTdTdTdTdTdTdTdTdTdTdTdTdTdT(Tth)(Tth) | 5993.85 | 5990.9 |
| A-140218 | dTdTdTdTdTdTdTdTdTdTdTdTdTdTdTdTdTdTdT(Tth) | 6007.875 | 6004.9 |
| A-140219 | dTdTdTdTdTdTdTdTdTdTdTdTdTdTdTdTdTdTdTs(Tth) | 6023.941 | 6020.9 |
| A-555740 | (Tth)dTdTdTdTdTdTdTdTdTdTdTdTdTdTdTdTdTdTdT | 6007.875 | 6004.9 |
| A-555741 | (Tths)dTdTdTdTdTdTdTdTdTdTdTdTdTdTdTdTdTdTdT | 6023.936 | 6020.9 |

TABLE 26
Oligo Synthesis and characterization of TNA for in vitro study (Table 26 discloses SEQ
ID NOS 217-260, respectively, in order of appearance)

| | | Molecular | Observed |
|---|---|---|---|
| Oligo ID | Oligo Sequence | Weight | Mass |
| A-250711 | (Aths)asCfaGfuGfuUfCfUfuGfcUfcUfaUfaAfL96 | 8558.15 | 8553.1 |
| A-250712 | Afs(Aths)CfaGfuGfuUfCfUfuGfcUfcUfaUfaAfL96 | 8546.115 | 8541.8 |
| A-250713 | Afsas(Cth)aGfuGfuUfCfUfuGfcUfcUfaUfaAfL96 | 8572.181 | 8567.2 |
| A-250714 | AfsasCf(Ath)GfuGfuUfCfUfuGfcUfcUfaUfaAfL96 | 8546.119 | 8541.5 |
| A-250715 | AfsasCfa(Gth)uGfuUfCfUfuGfcUfcUfaUfaAfL96 | 8558.155 | 8553.9 |
| A-250716 | AfsasCfaGf(Tth)GfuUfCfUfuGfcUfcUfaUfaAfL96 | 8560.144 | 8555.8 |
| A-250717 | AfsasCfaGfu(Gth)uUfCfUfuGfcUfcUfaUfaAfL96 | 8558.155 | 8553.2 |
| A-250718 | AfsasCfaGfuGf(Tth)UfCfUfuGfcUfcUfaUfaAfL96 | 8560.144 | 8555.3 |
| A-250719 | AfsasCfaGfuGfu(Tth)CfUfuGfcUfcUfaUfaAfL96 | 8572.18 | 8567.8 |
| A-250720 | AfsasCfaGfuGfuUf(Cth)UfuGfcUfcUfaUfaAfL96 | 8572.181 | 8567.2 |
| A-250721 | AfsasCfaGfuGfuUfCf(Tth)uGfcUfcUfaUfaAfL96 | 8572.18 | 8567.6 |
| A-250722 | AfsasCfaGfuGfuUfCfUf(Tth)GfcUfcUfaUfaAfL96 | 8560.144 | 8555.3 |
| A-250723 | AfsasCfaGfuGfuUfCfUfu(Gth)cUfcUfaUfaAfL96 | 8558.155 | 8553.5 |
| A-250724 | AfsasCfaGfuGfuUfCfUfuGf(Cth)UfcUfaUfaAfL96 | 8560.145 | 8555.7 |
| A-250725 | AfsasCfaGfuGfuUfCfUfuGfc(Tth)cUfaUfaAfL96 | 8572.18 | 8567.5 |
| A-250726 | AfsasCfaGfuGfuUfCfUfuGfcUf(Cth)UfaUfaAfL96 | 8560.145 | 8555.4 |
| A-250727 | AfsasCfaGfuGfuUfCfUfuGfcUfc(Tth)aUfaAfL96 | 8572.18 | 8567.8 |
| A-250728 | AfsasCfaGfuGfuUfCfUfuGfcUfcUf(Ath)UfaAfL96 | 8546.119 | 8541.9 |
| A-250729 | AfsasCfaGfuGfuUfCfUfuGfcUfcUfa(Tth)aAfL96 | 8572.18 | 8567.5 |
| A-250730 | AfsasCfaGfuGfuUfCfUfuGfcUfcUfaUf(Ath)AfL96 | 8546.119 | 8541.8 |
| A-250731 | AfsasCfaGfuGfuUfCfUfuGfcUfcUfaUfa(Ath)L96 | 8558.155 | 8553.8 |
| A-250732 | (Tths)UfsaUfaGfaGfcAfagaAfcAfcUfgUfususu | 7565.908 | 7562.1 |
| A-250733 | us(Tths)aUfaGfaGfcAfagaAfcAfcUfgUfususu | 7577.943 | 7574.1 |
| A-250734 | usUfs(Ath)UfaGfaGfcAfagaAfcAfcUfgUfususu | 7551.887 | 7548 |
| A-250735 | usUfsa(Tth)aGfaGfcAfagaAfcAfcUfgUfususu | 7577.948 | 7574.1 |
| A-250736 | usUfsaUf(Ath)GfaGfcAfagaAfcAfcUfgUfususu | 7551.887 | 7548 |
| A-250737 | usUfsaUfa(Gth)aGfcAfagaAfcAfcUfgUfususu | 7563.923 | 7560.1 |
| A-250738 | usUfsaUfaGf(Ath)GfcAfagaAfcAfcUfgUfususu | 7551.887 | 7548 |
| A-250739 | usUfsaUfaGfa(Gth)cAfagaAfcAfcUfgUfususu | 7563.923 | 7560.1 |
| A-250740 | usUfsaUfaGfaGf(Cth)AfagaAfcAfcUfgUfususu | 7565.913 | 7562.1 |
| A-250741 | usUfsaUfaGfaGfc(Ath)agaAfcAfcUfgUfususu | 7563.923 | 7560 |
| A-250742 | usUfsaUfaGfaGfcAf(Ath)gaAfcAfcUfgUfususu | 7551.887 | 7548 |
| A-250743 | usUfsaUfaGfaGfcAfa(Gth)aAfcAfcUfgUfususu | 7551.887 | 7548 |
| A-250744 | usUfsaUfaGfaGfcAfag(Ath)AfcAfcUfgUfususu | 7551.887 | 7548 |
| A-250745 | usUfsaUfaGfaGfcAfaga(Ath)cAfcUfgUfususu | 7563.923 | 7560.1 |
| A-250746 | usUfsaUfaGfaGfcAfagaAf(Cth)AfcUfgUfususu | 7565.913 | 7562.1 |
| A-250747 | usUfsaUfaGfaGfcAfagaAfc(Ath)cUfgUfususu | 7563.923 | 7560.1 |
| A-250748 | usUfsaUfaGfaGfcAfagaAfcAf(Cth)UfgUfususu | 7565.913 | 7562.1 |
| A-250749 | usUfsaUfaGfaGfcAfagaAfcAfc(Tth)gUfususu | 7577.948 | 7574.1 |
| A-250750 | usUfsaUfaGfaGfcAfagaAfcAfcUf(Gth)Ufususu | 7551.887 | 7548 |
| A-250751 | usUfsaUfaGfaGfcAfagaAfcAfcUfg(Tth)ususu | 7577.948 | 7574.1 |
| A-250752 | usUfsaUfaGfaGfcAfagaAfcAfcUfgUf(Tths)usu | 7565.908 | 7562.1 |
| A-250753 | usUfsaUfaGfaGfcAfagaAfcAfcUfgUfus(Tths)u | 7565.908 | 7562.1 |
| A-250754 | usUfsaUfaGfaGfcAfagaAfcAfcUfgUfusus(Tth) | 7565.912 | 7562.1 |

TABLE 27
Oligo Synthesis and characterization of HYP-based modification (Table 27 discloses
SEQ ID NOS 261-288, respectively, in order of appearance)

| Oligo ID | Oligo Sequence | Molecular Weight | Observed Mass |
|---|---|---|---|
| A-157540 | usUfsguQ198GfaUfGfacuuUfcAfcauucsusg | 7439.856 | 7436 |
| A-157541 | usUfsgucQ198aUfGfacuuUfcAfcauucsusg | 7411.868 | 7408.1 |
| A-157542 | usUfsgucGfQ198UfGfacuuUfcAfcauucsusg | 7415.831 | 7412 |
| A-157543 | usUfsgucGfaQ198GfacuuUfcAfcauucsusg | 7450.907 | 7447.1 |
| A-173412 | usUfsauQ198GfagcaagaAfcAfcuguususu | 7534.033 | 7530.2 |
| A-173413 | usUfsauaQ198agcaagaAfcAfcuguususu | 7530.07 | 7526.2 |
| A-173414 | usUfsauaGfQ198gcaagaAfcAfcuguususu | 7534.033 | 7530.1 |
| A-173415 | usUfsauaGfaQ198caagaAfcAfcuguususu | 7518.034 | 7514.2 |
| A-594465 | usUfs(Ahp)auaGfagcaagaAfcAfcuguususu | 8010.38 | 8006.3 |
| A-594466 | usUfsQ198uaGfagcaagaAfcAfcuguususu | 7534.033 | 7530.2 |
| A-594467 | usUfsa(Thp)aGfagcaagaAfcAfcuguususu | 7681.172 | 7677.2 |
| A-594468 | usUfsaQ198aGfagcaagaAfcAfcuguususu | 7557.073 | 7553.2 |
| A-594469 | usUfsau(Ahp)GfagcaagaAfcAfcuguususu | 7667.147 | 7663.9 |
| A-594470 | usUfsaua(Ghp)agcaagaAfcAfcuguususu | 7679.183 | 7675.2 |
| A-594471 | usUfsauaGf(Ahp)gcaagaAfcAfcuguususu | 7667.147 | 7663.2 |
| A-594472 | usUfsauaGfa(Ghp)caagaAfcAfcuguususu | 7667.147 | 7663.5 |
| A-594473 | usUfsauaGfag(Chp)aagaAfcAfcuguususu | 7667.146 | 7663.2 |
| A-594474 | usUfsauaGfagQ198aagaAfcAfcuguususu | 7558.058 | 7554.2 |
| A-594475 | usUfs(Ghp)ucGfaUfGfacuuUfcAfcauucsusg | 7548.945 | 7545.1 |
| A-594476 | usUfsQ198ucGfaUfGfacuuUfcAfcauucsusg | 7399.832 | 7396 |
| A-594477 | usUfsg(Thp)cGfaUfGfacuuUfcAfcauucsusg | 7562.97 | 7559.1 |
| A-594478 | usUfsgQ198cGfaUfGfacuuUfcAfcauucsusg | 7438.871 | 7435.1 |
| A-594479 | usUfsgu(Chp)GfaUfGfacuuUfcAfcauucsusg | 7548.944 | 7545.1 |
| A-594480 | usUfsguc(Ghp)aUfGfacuuUfcAfcauucsusg | 7560.981 | 7557.6 |
| A-594481 | usUfsgucGf(Ahp)UfGfacuuUfcAfcauucsusg | 7548.945 | 7545.1 |
| A-594482 | usUfsgucGfa(Thp)GfacuuUfcAfcauucsusg | 7575.006 | 7571.1 |
| A-594483 | usUfsgucGfaUf(Ghp)acuuUfcAfcauucsusg | 7560.981 | 7557.8 |
| A-594484 | usUfsgucGfaUfQ198acuuUfcAfcauucsusg | 7411.868 | 7408.1 |

[0902] Determination of UV thermal melting temperatures of mUNA 12-mer duplexes: Thermal melting temperatures were measured with equimolar concentrations of both strands (2.0 μM) in (a) lx PBS ([NaCl]=137 mM, [KCl]=2.7 mM, [Na₂HPO₄]=8 mM, [KH₂PO₄]=2 mM, pH 7.4) or in (b) 8×PBS ([NaCl]=1.1 M, [KCl]=22 mM, [Na₂HPO₄]=64 mM, [KH₂PO₄]=16 mM, pH 7.4) by monitoring A₂₆₀ with increasing temperature (1° C./min). Values were reported as the maximum of the first derivative and are the average of at least two experiments.

TABLE 28
UV thermal melting temperatures mUNA 12-mer duplexes (Table 28 discloses SEQ ID NOS 289-368, respectively, in order of
columns)

| | | | | | | | Tm | ΔTm | Tm | ΔTm |
|---|---|---|---|---|---|---|---|---|---|---|
| Well | Sample Name | Target | sOligoName | sOligoSeq | asOligoName | asOligoSeq | (° C.)ª | (° C.) | (° C.)^{b} | (° C.) |
| A1 | AD-64366.2 | N/A | A-126502.7 | UACAGUCUAUGU | A-126503.7 | ACAUAGACUGUA | 52.1 | 0.0 | 61.1 | 0.0 |
| B1 | AD-511219.1 | N/A | A-637538.2 | UACAGY95CUAUGU | A-126503.8 | ACAUAGACUGUA | 35.2 | −17.0 | 43.3 | −17.8 |
| C1 | AD-511220.1 | N/A | A-637540.2 | UACAGY96CUAUGU | A-126503.9 | ACAUAGACUGUA | 34.3 | −17.8 | 42.4 | −18.7 |
| D1 | AD-511221.1 | N/A | A-637542.2 | UACAGY97CUAUGU | A-126503.10 | ACAUAGACUGUA | 33.4 | −18.7 | 42.5 | −18.6 |
| E1 | AD-511222.1 | N/A | A-637544.2 | UACAGY98CUAUGU | A-126503.11 | ACAUAGACUGUA | 33.5 | −18.6 | 42.6 | −18.5 |
| F1 | AD-511223.1 | N/A | A-637546.2 | UACAGY99CUAUGU | A-126503.12 | ACAUAGACUGUA | 34.1 | −18.0 | 42.1 | −19.0 |
| G1 | AD-511224.1 | N/A | A-637548.2 | UACAGY100CUAUGU | A-126503.13 | ACAUAGACUGUA | 34.2 | −18.0 | 43.3 | −17.8 |
| H1 | AD-511225.1 | N/A | A-637550.2 | UACAGY101CUAUGU | A-126503.14 | ACAUAGACUGUA | 36.3 | −15.8 | 45.4 | −15.7 |
| A2 | AD-511226.1 | N/A | A-637552.2 | UACAGY102CUAUGU | A-126503.15 | ACAUAGACUGUA | 38.4 | −13.7 | 47.5 | −13.6 |
| B2 | AD-511227.1 | N/A | A-235403.3 | UACAG(Uun)CUAUGU | A-126503.16 | ACAUAGACUGUA | 35.5 | −16.6 | 43.6 | −17.5 |
| C2 | AD-64367.2 | N/A | A-126504.3 | dTdAdCdAdGdTdCdTdAdTdGdT | A-126505.3 | dAdCdAdTdAdGdAdCdTdGdTdA | 43.1 | | 49.1 | 0.0 |
| D2 | AD-511228.1 | N/A | A-637539.2 | dTdAdCdAdGY95dCdTdAdTdGdT | A-126505.4 | dAdCdAdTdAdGdAdCdTdGdTdA | <30 | | 22.3 | −26.8 |
| E2 | AD-511229.1 | N/A | A-637541.2 | dTdAdCdAdGY96dCdTdAdTdGdT | A-126505.5 | dAdCdAdTdAdGdAdCdTdGdTdA | <30 | | 23.4 | −25.7 |
| F2 | AD-511230.1 | N/A | A-637543.2 | dTdAdCdAdGY97dCdTdAdTdGdT | A-126505.6 | dAdCdAdTdAdGdAdCdTdGdTdA | <30 | | 23.5 | −25.6 |
| G2 | AD-511231.1 | N/A | A-637545.2 | dTdAdCdAdGY98dCdTdAdTdGdT | A-126505.7 | dAdCdAdTdAdGdAdCdTdGdTdA | <30 | | 23.6 | −25.5 |
| H2 | AD-511232.1 | N/A | A-637547.2 | dTdAdCdAdGY99dCdTdAdTdGdT | A-126505.8 | dAdCdAdTdAdGdAdCdTdGdTdA | <30 | | 25.1 | −24.0 |
| A3 | AD-511233.1 | N/A | A-637549.2 | dTdAdCdAdGY100dCdTdAdTdGdT | A-126505.9 | dAdCdAdTdAdGdAdCdTdGdTdA | <30 | | 22.3 | −26.8 |
| B3 | AD-511234.1 | N/A | A-637551.2 | dTdAdCdAdGY101dCdTdAdTdGdT | A-126505.10 | dAdCdAdTdAdGdAdCdTdGdTdA | <30 | | 23.4 | −25.7 |
| C3 | AD-511235.1 | N/A | A-637553.2 | dTdAdCdAdGY102dCdTdAdTdGdT | A-126505.11 | dAdCdAdTdAdGdAdCdTdGdTdA | <30 | | 26.5 | −22.6 |
| D3 | AD-511236.1 | N/A | A-235396.3 | dTdAdCdAdG(Uun)dCdTdAdTdGdT | A-126505.12 | dAdCdAdTdAdGdAdCdTdGdTdA | <30 | | 23.6 | −25.5 |
| E3 | AD-511237.1 | N/A | A-126502.8 | UACAGUCUAUGU | A-126505.13 | dAdCdAdTdAdGdAdCdTdGdTdA | 39.1 | | 45.1 | 0.0 |
| F3 | AD-511238.1 | N/A | A-637538.3 | UACAGY95CUAUGU | A-126505.14 | dAdCdAdTdAdGdAdCdTdGdTdA | <30 | | 22.3 | −22.8 |
| G3 | AD-511239.1 | N/A | A-637540.3 | UACAGY96CUAUGU | A-126505.15 | dAdCdAdTdAdGdAdCdTdGdTdA | <30 | | 23.4 | −21.7 |
| H3 | AD-511240.1 | N/A | A-637542.3 | UACAGY97CUAUGU | A-126505.16 | dAdCdAdTdAdGdAdCdTdGdTdA | <30 | | 22.5 | −22.6 |
| A4 | AD-511241.1 | N/A | A-637544.3 | UACAGY98CUAUGU | A-126505.17 | dAdCdAdTdAdGdAdCdTdGdTdA | <30 | | 22.6 | −22.5 |
| B4 | AD-511242.1 | N/A | A-637546.3 | UACAGY99CUAUGU | A-126505.18 | dAdCdAdTdAdGdAdCdTdGdTdA | <30 | | 27.1 | −18.0 |
| C4 | AD-511243.1 | N/A | A-637548.3 | UACAGY100CUAUGU | A-126505.19 | dAdCdAdTdAdGdAdCdTdGdTdA | <30 | | 27.3 | −17.8 |
| D4 | AD-511244.1 | N/A | A-637550.3 | UACAGY101CUAUGU | A-126505.20 | dAdCdAdTdAdGdAdCdTdGdTdA | <30 | | 23.4 | −21.7 |
| E4 | AD-511245.1 | N/A | A-637552.3 | UACAGY102CUAUGU | A-126505.21 | dAdCdAdTdAdGdAdCdTdGdTdA | <30 | | 26.5 | −18.6 |
| F4 | AD-511246.1 | N/A | A-235403.4 | UACAG(Uun)CUAUGU | A-126505.22 | dAdCdAdTdAdGdAdCdTdGdTdA | <30 | | 24.6 | −20.5 |
| G4 | AD-511247.1 | N/A | A-126504.4 | dTdAdCdAdGdTdCdTdAdTdGdT | A-126503.17 | ACAUAGACUGUA | 42.1 | | 49.1 | 0.0 |
| H4 | AD-511248.1 | N/A | A-637539.3 | dTdAdCdAdGY95dCdTdAdTdGdT | A-126503.18 | ACAUAGACUGUA | <30 | | 29.2 | −20.0 |
| A5 | AD-511249.1 | N/A | A-637541.3 | dTdAdCdAdGY96dCdTdAdTdGdT | A-126503.19 | ACAUAGACUGUA | <30 | | 28.3 | −20.9 |
| B5 | AD-511250.1 | N/A | A-637543.3 | dTdAdCdAdGY97dCdTdAdTdGdT | A-126503.20 | ACAUAGACUGUA | <30 | | 26.4 | −22.7 |
| C5 | AD-511251.1 | N/A | A-637545.3 | dTdAdCdAdGY98dCdTdAdTdGdT | A-126503.21 | ACAUAGACUGUA | <30 | | 28.6 | −20.6 |
| D5 | AD-511252.1 | N/A | A-637547.3 | dTdAdCdAdGY99dCdTdAdTdGdT | A-126503.22 | ACAUAGACUGUA | <30 | | 27.1 | −22.0 |
| E5 | AD-511253.1 | N/A | A-637549.3 | dTdAdCdAdGY100dCdTdAdTdGdT | A-126503.23 | ACAUAGACUGUA | <30 | | 27.2 | −22.0 |
| F5 | AD-511254.1 | N/A | A-637551.3 | dTdAdCdAdGY101dCdTdAdTdGdT | A-126503.24 | ACAUAGACUGUA | <30 | | 31.3 | −17.9 |
| G5 | AD-511255.1 | N/A | A-637553.3 | dTdAdCdAdGY102dCdTdAdTdGdT | A-126503.25 | ACAUAGACUGUA | <30 | | 36.4 | −12.7 |
| H5 | AD-511256.1 | N/A | A-235396.4 | dTdAdCdAdG(Uun)dCdTdAdTdGdT | A-126503.26 | ACAUAGACUGUA | <30 | | 28.6 | −20.6 |

[0903] Determination of UV thermal melting temperatures of m UNA 21-/23-mer duplexes: Thermal melting temperatures were measured with equimolar concentrations of both strands (1.0 μM) in (a) 0.25×PBS ([NaCl]=34 mM, [KCl]=0.68 mM, [Na₂HPO₄]=2 mM, [KH₂PO₄]=0.5 mM, pH 7.4) by monitoring A₂₆₀ with increasing temperature (1° C./min). Values were reported as the maximum of the first derivative and are the average of at least two experiments.

TABLE 290
UV thermal melting temperatures mUNA 21-/23-mer duplexes (Table 29 discloses
SEQ ID NOS 369-424, respectively, in order of columns)

| Duplex ID | Sense Strand | Antisense Strand | Tm (°C) | ΔTm (° C.) | Modification |
|---|---|---|---|---|---|
| AD-125773.8 | ususcuugCfuCfUfAfuaaaccguguL96 | asCfsacgguuuauagAfgCfaagaascsa | 89.02 | 0 | |
| AD-218916.1 | ususcuugCfuCfUfAfuaaaccguguL96 | asCfsacggY100uuauagAfgCfaagaascsa | 81.17 | −7.85 | Y100 |
| AD-218921.1 | asgsuguuCfuUfGfCfucuauaaacaL96 | usGfsuuY98auagagcaAfgAfacacusgsu | 83.97 | −5.05 | Y98 |
| AD-218927.1 | asgsuguuCfuUfGfCfucuauaaacaL96 | usGfsuuuaY96agagcaAfgAfacacusgsu | 83.02 | −6 | Y96 |
| AD-126010.4 | ususcuugCfuCfUfAfuaaaccguguL96 | asCfsacgg(Tgn)uuauagAfgCfaagaascsa | 88.12 | −0.9 | GNA-T |
| AD-218922.1 | asgsuguuCfuUfGfCfucuauaaacaL96 | usGfsuuY99auagagcaAfgAfacacusgsu | 84.02 | −5 | Y99 |
| AD-218928.1 | asgsuguuCfuUfGfCfucuauaaacaL96 | usGfsuuuaY98agagcaAfgAfacacusgsu | 82.12 | −6.9 | Y98 |
| AD-133768.2 | ususcuugCfuCfUfAfuaaaccguguL96 | asCfsacgg(Uun)uuauagAfgCfaagaascsa | 80.12 | −8.9 | UNA-U |
| AD-125762.7 | asgsuguuCfuUfGfCfucuauaaacaL96 | usGfsuuuauagagcaAfgAfacacusgsu | 87.27 | 0 | |
| AD-218923.1 | asgsuguuCfuUfGfCfucuauaaacaL96 | usGfsuuY100auagagcaAfgAfacacusgsu | 84.07 | −3.2 | Y100 |
| AD-218929.1 | asgsuguuCfuUfGfCfucuauaaacaL96 | usGfsuuuaY99agagcaAfgAfacacusgsu | 81.97 | −5.3 | Y99 |
| AD-218911.1 | ususcuugCfuCfUfAfuaaaccguguL96 | asCfsacggY95uuauagAfgCfaagaascsa | 80.27 | −7 | Y95 |
| AD-125841.3 | asgsuguuCfuUfGfCfucuauaaacaL96 | usGfsuu(Tgn)auagagcaAfgAfacacusgsu | 84.02 | −3.25 | GNA-T |
| AD-218924.1 | asgsuguuCfuUfGfCfucuauaaacaL96 | usGfsuuY101auagagcaAfgAfacacusgsu | 85.17 | −2.1 | Y101 |
| AD-218930.1 | asgsuguuCfuUfGfCfucuauaaacaL96 | usGfsuuuaY100agagcaAfgAfacacusgsu | 81.97 | −5.3 | Y100 |
| AD-218912.1 | ususcuugCfuCfUfAfuaaaccguguL96 | asCfsacggY97uuauagAfgCfaagaascsa | 80.32 | −6.95 | Y97 |
| AD-133733.2 | asgsuguuCfuUfGfCfucuauaaacaL96 | usGfsuu(Uun)auagagcaAfgAfacacusgsu | 84.07 | −3.2 | UNA-U |
| AD-125999.4 | asgsuguuCfuUfGfCfucuauaaacaL96 | usGfsuuua(Tgn)agagcaAfgAfacacusgsu | 83.22 | −4.05 | GNA-T |
| AD-218931.1 | asgsuguuCfuUfGfCfucuauaaacaL96 | usGfsuuuaY101agagcaAfgAfacacusgsu | 82.97 | −4.3 | Y101 |
| AD-218913.1 | ususcuugCfuCfUfAfuaaaccguguL96 | asCfsacggY96uuauagAfgCfaagaascsa | 80.02 | −7.25 | Y96 |
| AD-218918.1 | asgsuguuCfuUfGfCfucuauaaacaL96 | usGfsuuY95auagagcaAfgAfacacusgsu | 84.17 | −3.1 | Y95 |
| AD-133735.2 | asgsuguuCfuUfGfCfucuauaaacaL96 | usGfsuuua(Uun)agagcaAfgAfacacusgsu | 81.97 | −5.3 | UNA-U |
| AD-218914.1 | ususcuugCfuCfUfAfuaaaccguguL96 | asCfsacggY98uuauagAfgCfaagaascsa | 80.02 | −7.25 | Y98 |
| AD-218919.1 | asgsuguuCfuUfGfCfucuauaaacaL96 | usGfsuuY97auagagcaAfgAfacacusgsu | 84.22 | −3.05 | Y97 |
| AD-218925.1 | asgsuguuCfuUfGfCfucuauaaacaL96 | usGfsuuuaY95agagcaAfgAfacacusgsu | 81.97 | −5.3 | Y95 |
| AD-218915.1 | ususcuugCfuCfUfAfuaaaccguguL96 | asCfsacggY99uuauagAfgCfaagaascsa | 81.12 | −6.15 | Y99 |
| AD-218920.1 | asgsuguuCfuUfGfCfucuauaaacaL96 | usGfsuuY96auagagcaAfgAfacacusgsu | 84.27 | −3 | Y96 |
| AD-218926.1 | asgsuguuCfuUfGfCfucuauaaacaL96 | usGfsuuuaY97agagcaAfgAfacacusgsu | 82.02 | −5.25 | Y97 |

[0904] Determination of UV thermal melting temperatures of TNA 12-mer duplexes: Thermal melting temperatures were measured with equimolar concentrations of both strands (2.0 μM) in 1×PBS ([NaCl]=137 mM, [KCl]=2.7 mM, [Na₂HPO₄]=8 mM, [KH₂PO₄]=2 mM, pH 7.4) by monitoring A₂₆₀ with increasing temperature (1° C./min). Values were reported as the maximum of the first derivative and are the average of at least two experiments. FIG. 33 shows TNA monomer structures.

TABLE 30
UV thermal melting temperatures of TNA 12-mer duplexes (Table 30 discloses SEQ ID
NOS 425-480, respectively, in order of columns)

| Duplex ID | sOligo ID | sOligo Sequence | asOligo ID | asOligo Sequence | Tm (° C.) | ΔTm (° C.) |
|---|---|---|---|---|---|---|
| AD-64366.3 | A-126502.9 | UACAGUCUAUGU | A-126503.27 | ACAUAGACUGUA | 52.57 | 0 |
| AD-649408.1 | A-126502.10 | UACAGUCUAUGU | A-815961.2 | ACAUAG(Ath)CUGUA | 48.07 | −4.5 |
| AD-72587.2 | A-144735.2 | UACAGU(Cth)UAUGU | A-126503.28 | ACAUAGACUGUA | 47.12 | −5.45 |
| AD-649409.1 | A-126502.11 | UACAGUCUAUGU | A-815960.2 | ACAUA(Gth)ACUGUA | 47.67 | −4.9 |
| AD-72585.2 | A-140220.2 | UACAG(Tth)CUAUGU | A-126503.29 | ACAUAGACUGUA | 47.745 | −4.825 |
| AD-649410.1 | A-140220.3 | UACAG(Tth) CUAUGU | A-815961.3 | ACAUAG(Ath)CUGUA | 43.07 | −9.5 |
| AD-649411.1 | A-144735.3 | UACAGU(Cth)UAUGU | A-815960.3 | ACAUA(Gth)ACUGUA | 41.57 | −11 |
| AD-64366.4 | A-126502.12 | UACAGUCUAUGU | A-126503.30 | ACAUAGACUGUA | 52.62 | 0 |
| AD-649412.1 | A-126502.13 | UACAGUCUAUGU | A-163716.4 | ACAUAGAfCUGUA | 53.17 | 0.55 |
| AD-649413.1 | A-319061.4 | UACAGUCFUAUGU | A-126503.31 | ACAUAGACUGUA | 54.245 | 1.625 |
| AD-649414.1 | A-126502.14 | UACAGUCUAUGU | A-818179.3 | ACAUAGfACUGUA | 53.07 | 0.45 |
| AD-64980.2 | A-129612.3 | UACAGUfCUAUGU | A-126503.32 | ACAUAGACUGUA | 53.14 | 0.52 |
| AD-649415.1 | A-129612.4 | UACAGUfCUAUGU | A-163716.5 | ACAUAGAfCUGUA | 54.22 | 1.6 |
| AD-649416.1 | A-319061.5 | UACAGUCUAUGU | A-818179.4 | ACAUAGfACUGUA | 55.32 | 2.7 |
| AD-64367.3 | A-126504.5 | dTdAdCdAdGdTdCdTdAdTdGdT | A-126505.23 | dAdCdAdTdAdGdAdCdTdGdTdA | 42.42 | 0 |
| AD-649417.1 | A-126504.6 | dTdAdCdAdGdTdCdTdAdTdGdT | A-815963.2 | dAdCdAdTdAdG(Ath)dCdTdGdTdA | 43.07 | 0.65 |
| AD-649418.1 | A-1036755.2 | dTdAdCdAdGdT(Cth)dTdAdTdGdT | A-126505.24 | dAdCdAdTdAdGdAdCdTdGdTdA | 40.64 | −1.78 |
| AD-649419.1 | A-126504.7 | dTdAdCdAdGdTdCdTdAdTdGdT | A-815962.2 | dAdCdAdTdA(Gth)dAdCdTdGdTdA | 44.22 | 1.8 |
| AD-72586.2 | A-140221.2 | dTdAdCdAdG(Tth)dCdTdAdTdGdT | A-126505.25 | dAdCdAdTdAdGdAdCdTdGdTdA | 40.32 | 2.1 |
| AD-649420.1 | A-140221.3 | dTdAdCdAdG(Tth)dCdTdAdTdGdT | A-815963.3 | dAdCdAdTdAdG(Ath)dCdTdGdTdA | 39.92 | −2.5 |
| AD-649421.1 | A-1036755.3 | dTdAdCdAdGdT(Cth)dTdAdTdGdT | A-815962.3 | dAdCdAdTdA(Gth)dAdCdTdGdTdA | 40.055 | −2.365 |
| AD-64367.4 | A-126504.8 | dTdAdCdAdGdTdCdTdAdTdGdT | A-126505.26 | dAdCdAdTdAdGdAdCdTdGdTdA | 42.67 | 0 |
| AD-649422.1 | A-126504.9 | dTdAdCdAdGdTdCdTdAdTdGdT | A-163712.3 | dAdCdAdTdAdGAfdCdTdGdTdA | 42.27 | −0.4 |
| AD-649423.1 | A-816165.2 | dTdAdCdAdGdTCfdTdAdTdGdT | A-126505.27 | dAdCdAdTdAdGdAdCdTdGdTdA | 42.345 | −0.325 |
| AD-649424.1 | A-126504.10 | dTdAdCdAdGdTdCdTdAdTdGdT | A-1036756.2 | dAdCdAdTdAGfdAdCdTdGdTdA | 42.945 | 0.275 |
| AD-64981.2 | A-129613.2 | dTdAdCdAdGUfdCdTdAdTdGdT | A-126505.28 | dAdCdAdTdAdGdAdCdTdGdTdA | 40.055 | −2.615 |
| AD-649425.1 | A-129613.3 | dTdAdCdAdGUfdCdTdAdTdGdT | A-163712.4 | dAdCdAdTdAdGAfdCdTdGdTdA | 40.17 | −2.5 |
| AD-649426.1 | A-816165.3 | dTdAdCdAdGdTCfdTdAdTdGdT | A-1036756.3 | dAdCdAdTdAGfdAdCdTdGdTdA | 42.77 | 0.1 |

[0905] Determination of UV thermal melting temperatures of TNA 21-/23-mer duplexes:_Thermal melting temperatures were measured with equimolar concentrations of both strands (1.0 μM) in (a) 0.1×PBS ([NaCl]=14 mM, [KCl]=0.27 mM, [Na₂HPO₄]=0.8 mM, [KH₂PO₄]=0.2 mM, pH 7.4) by monitoring A₂₆₀ with increasing temperature (1° C./min). Values were reported as the maximum of the first derivative and are the average of at least two experiments.

TABLE 31
UV thermal melting temperatures of TNA 21-/23-mer duplexes (Table 31 discloses SEQ ID NOS 481-614, respectively, in
order of columns)

| Duplex ID | Sense Strand | Antisense Strand | Tm | Δ Tm |
|---|---|---|---|---|
| AD-57727.134 | AfsasCfaGfuGfuUfCfUfuGfcUfcUfaUfaAfL96 | usUfsaUfaGfaGfcAfagaAfcAfcUfgUfususu | 79.02 | 0 |
| AD-126259.1 | (Aths)asCfaGfuGfuUfCfUfuGfcUfcUfaUfaAfL96 | usUfsaUfaGfaGfcAfagaAfcAfcUfgUfususu | 79.12 | 0.1 |
| AD-126260.1 | Afs(Aths)CfaGfuGfuUfCfUfuGfcUfcUfaUfaAfL96 | usUfsaUfaGfaGfcAfagaAfcAfcUfgUfususu | 78.22 | −0.8 |
| AD-126261.1 | Afsas(Cth)aGfuGfuUfCfUfuGfcUfcUfaUfaAfL96 | usUfsaUfaGfaGfcAfagaAfcAfcUfgUfususu | 76.36 | −2.66 |
| AD-126262.1 | AfsasCf(Ath)GfuGfuUfCfUfuGfcUfcUfaUfaAfL96 | usUfsaUfaGfaGfcAfagaAfcAfcUfgUfususu | 76.57 | −2.45 |
| AD-126263.1 | AfsasCfa(Gth)uGfuUfCfUfuGfcUfcUfaUfaAfL96 | usUfsaUfaGfaGfcAfagaAfcAfcUfgUfususu | 75.02 | −4 |
| AD-126264.1 | AfsasCfaGf(Tth)GfuUfCfUfuGfcUfcUfaUfaAfL96 | usUfsaUfaGfaGfcAfagaAfcAfcUfgUfususu | 77.02 | −2 |
| AD-126265.1 | AfsasCfaGfu(Gth)uUfCfUfuGfcUfcUfaUfaAfL96 | usUfsaUfaGfaGfcAfagaAfcAfcUfgUfususu | 76.12 | −2.9 |
| AD-126266.1 | AfsasCfaGfuGf(Tth)UfCfUfuGfcUfcUfaUfaAfL96 | usUfsaUfaGfaGfcAfagaAfcAfcUfgUfususu | 73.22 | −5.8 |
| AD-126267.1 | AfsasCfaGfuGfu(Tth)CfUfuGfcUfcUfaUfaAfL96 | usUfsaUfaGfaGfcAfagaAfcAfcUfgUfususu | 74.36 | −4.66 |
| AD-126268.1 | AfsasCfaGfuGfuUf(Cth)UfuGfcUfcUfaUfaAfL96 | usUfsaUfaGfaGfcAfagaAfcAfcUfgUfususu | 75.02 | −4 |
| AD-126269.1 | AfsasCfaGfuGfuUfCf(Tth)uGfcUfcUfaUfaAfL96 | usUfsaUfaGfaGfcAfagaAfcAfcUfgUfususu | 76.12 | −2.9 |
| AD-126270.1 | AfsasCfaGfuGfuUfCfUf(Tth)GfcUfcUfaUfaAfL96 | usUfsaUfaGfaGfcAfagaAfcAfcUfgUfususu | 76.27 | −2.75 |
| AD-126271.1 | AfsasCfaGfuGfuUfCfUfu(Gth)cUfcUfaUfaAfL96 | usUfsaUfaGfaGfcAfagaAfcAfcUfgUfususu | 75.42 | −3.6 |
| AD-126272.1 | AfsasCfaGfuGfuUfCfUfuGf(Cth)UfcUfaUfaAfL96 | usUfsaUfaGfaGfcAfagaAfcAfcUfgUfususu | 77.57 | −1.45 |
| AD-126273.1 | AfsasCfaGfuGfuUfCfUfuGfc(Tth)cUfaUfaAfL96 | usUfsaUfaGfaGfcAfagaAfcAfcUfgUfususu | 75.02 | −4 |
| AD-126274.1 | AfsasCfaGfuGfuUfCfUfuGfcUf(Cth)UfaUfaAfL96 | usUfsaUfaGfaGfcAfagaAfcAfcUfgUfususu | 76.02 | −3 |
| AD-126275.1 | AfsasCfaGfuGfuUfCfUfuGfcUfc(Tth)aUfaAfL96 | usUfsaUfaGfaGfcAfagaAfcAfcUfgUfususu | 76.12 | −2.9 |
| AD-126276.1 | AfsasCfaGfuGfuUfCfUfuGfcUfcUf(Ath)UfaAfL96 | usUfsaUfaGfaGfcAfagaAfcAfcUfgUfususu | 77.27 | −1.75 |
| AD-126277.1 | AfsasCfaGfuGfuUfCfUfuGfcUfcUfa(Tth)aAfL96 | usUfsaUfaGfaGfcAfagaAfcAfcUfgUfususu | 77.42 | −1.6 |
| AD-126278.1 | AfsasCfaGfuGfuUfCfUfuGfcUfcUfaUf(Ath)AfL96 | usUfsaUfaGfaGfcAfagaAfcAfcUfgUfususu | 79.02 | 0 |
| AD-126279.1 | AfsasCfaGfuGfuUfCfUfuGfcUfcUfaUfa(Ath)L96 | usUfsaUfaGfaGfcAfagaAfcAfcUfgUfususu | 78.52 | −0.5 |
| AD-126280.1 | AfsasCfaGfuGfuUfCfUfuGfcUfcUfaUfaAfL96 | (Tths)UfsaUfaGfaGfcAfagaAfcAfcUfgUfususu | 76.87 | −2.15 |
| AD-126281.1 | AfsasCfaGfuGfuUfCfUfuGfcUfcUfaUfaAfL96 | us(Tths)aUfaGfaGfcAfagaAfcAfcUfgUfususu | 78.53 | −0.49 |
| AD-126282.1 | AfsasCfaGfuGfuUfCfUfuGfcUfcUfaUfaAfL96 | usUfs(Ath)UfaGfaGfcAfagaAfcAfcUfgUfususu | 78.27 | −0.75 |
| AD-126283.1 | AfsasCfaGfuGfuUfCfUfuGfcUfcUfaUfaAfL96 | usUfsa(Tth)aGfaGfcAfagaAfcAfcUfgUfususu | 77.87 | −1.15 |
| AD-126284.1 | AfsasCfaGfuGfuUfCfUfuGfcUfcUfaUfaAfL96 | usUfsaUf(Ath)GfaGfcAfagaAfcAfcUfgUfususu | 79.02 | 0 |
| AD-126285.1 | AfsasCfaGfuGfuUfCfUfuGfcUfcUfaUfaAfL96 | usUfsaUfa(Gth)aGfcAfagaAfcAfcUfgUfususu | 75.52 | −3.5 |
| AD-126286.1 | AfsasCfaGfuGfuUfCfUfuGfcUfcUfaUfaAfL96 | usUfsaUfaGf(Ath)GfcAfagaAfcAfcUfgUfususu | 75.87 | −3.15 |
| AD-126287.1 | AfsasCfaGfuGfuUfCfUfuGfcUfcUfaUfaAfL96 | usUfsaUfaGfa(Gth)cAfagaAfcAfcUfgUfususu | 74.53 | −4.49 |
| AD-126288.1 | AfsasCfaGfuGfuUfCfUfuGfcUfcUfaUfaAfL96 | usUfsaUfaGfaGf(Cth)AfagaAfcAfcUfgUfususu | 76.02 | −3 |
| AD-126289.1 | AfsasCfaGfuGfuUfCfUfuGfcUfcUfaUfaAfL96 | usUfsaUfaGfaGfc(Ath)agaAfcAfcUfgUfususu | 75.12 | −3.9 |
| AD-126290.1 | AfsasCfaGfuGfuUfCfUfuGfcUfcUfaUfaAfL96 | usUfsaUfaGfaGfcAf(Ath)gaAfcAfcUfgUfususu | 77.22 | −1.8 |
| AD-126291.1 | AfsasCfaGfuGfuUfCfUfuGfcUfcUfaUfaAfL96 | usUfsaUfaGfaGfcAfa(Gth)aAfcAfcUfgUfususu | 75.42 | −3.6 |
| AD-126292.1 | AfsasCfaGfuGfuUfCfUfuGfcUfcUfaUfaAfL96 | usUfsaUfaGfaGfcAfag(Ath)AfcAfcUfgUfususu | 75.57 | −3.45 |
| AD-126293.1 | AfsasCfaGfuGfuUfCfUfuGfcUfcUfaUfaAfL96 | usUfsaUfaGfaGfcAfaga(Ath)cAfcUfgUfususu | 76.02 | −3 |
| AD-126294.1 | AfsasCfaGfuGfuUfCfUfuGfcUfcUfaUfaAfL96 | usUfsaUfaGfaGfcAfagaAf(Cth)AfcUfgUfususu | 77.02 | −2 |
| AD-126295.1 | AfsasCfaGfuGfuUfCfUfuGfcUfcUfaUfaAfL96 | usUfsaUfaGfaGfcAfagaAfc(Ath)cUfgUfususu | 77.12 | −1.9 |
| AD-126296.1 | AfsasCfaGfuGfuUfCfUfuGfcUfcUfaUfaAfL96 | usUfsaUfaGfaGfcAfagaAfcAf(Cth)UfgUfususu | 77.22 | −1.8 |
| AD-126297.1 | AfsasCfaGfuGfuUfCfUfuGfcUfcUfaUfaAfL96 | usUfsaUfaGfaGfcAfagaAfcAfc(Tth)gUfususu | 73.42 | −5.6 |
| AD-126298.1 | AfsasCfaGfuGfuUfCfUfuGfcUfcUfaUfaAfL96 | usUfsaUfaGfaGfcAfagaAfcAfcUf(Gth)Ufususu | 77.02 | −2 |
| AD-126299.1 | AfsasCfaGfuGfuUfCfUfuGfcUfcUfaUfaAfL96 | usUfsaUfaGfaGfcAfagaAfcAfcUfg(Tth)ususu | 77.12 | −1.9 |
| AD-126300.1 | AfsasCfaGfuGfuUfCfUfuGfcUfcUfaUfaAfL96 | usUfsaUfaGfaGfcAfagaAfcAfcUfgUf(Tths)usu | 78.32 | −0.7 |
| AD-126301.1 | AfsasCfaGfuGfuUfCfUfuGfcUfcUfaUfaAfL96 | usUfsaUfaGfaGfcAfagaAfcAfcUfgUfus(Tths)u | 79.52 | 0.5 |
| AD-126302.1 | AfsasCfaGfuGfuUfCfUfuGfcUfcUfaUfaAfL96 | usUfsaUfaGfaGfcAfagaAfcAfcUfgUfusus(Tth) | 77.66 | −1.36 |
| AD-57727.135 | AfsasCfaGfuGfuUfCfUfuGfcUfcUfaUfaAfL96 | usUfsaUfaGfaGfcAfagaAfcAfcUfgUfususu | 75.02 | 0 |
| AD-134022.1 | (Aths)asCfaGfuGfuUfCfUfuGfcUfcUfaUfaAfL96 | usUfsaUfaGfaGfcAfagaAfcAfcUfgUf(Tths)usu | 78.02 | 3 |
| AD-134023.1 | Afs(Aths)CfaGfuGfuUfCfUfuGfcUfcUfaUfaAfL96 | usUfsaUfaGfaGfcAfagaAfcAfcUfg(Tth)ususu | 77.12 | 2.1 |
| AD-134024.1 | Afsas(Cth)aGfuGfuUfCfUfuGfcUfcUfaUfaAfL96 | usUfsaUfaGfaGfcAfagaAfcAfcUf(Gth)Ufususu | 75.32 | 0.3 |
| AD-134025.1 | AfsasCf(Ath)GfuGfuUfCfUfuGfcUfcUfaUfaAfL96 | usUfsaUfaGfaGfcAfagaAfcAfc(Tth)gUfususu | 74.52 | −0.5 |
| AD-134026.1 | AfsasCfa(Gth)uGfuUfCfUfuGfcUfcUfaUfaAfL96 | usUfsaUfaGfaGfcAfagaAfcAf(Cth)UfgUfususu | 73.02 | −2 |
| AD-134027.1 | AfsasCfaGf(Tth)GfuUfCfUfuGfcUfcUfaUfaAfL96 | usUfsaUfaGfaGfcAfagaAfc(Ath)cUfgUfususu | 74.12 | −0.9 |
| AD-134028.1 | AfsasCfaGfu(Gth)uUfCfUfuGfcUfcUfaUfaAfL96 | usUfsaUfaGfaGfcAfagaAf(Cth)AfcUfgUfususu | 73.32 | −1.7 |
| AD-134029.1 | AfsasCfaGfuGf(Tth)UfCfUfuGfcUfcUfaUfaAfL96 | usUfsaUfaGfaGfcAfaga(Ath)cAfcUfgUfususu | 73.52 | −1.5 |
| AD-134030.1 | AfsasCfaGfuGfu(Tth)CfUfuGfcUfcUfaUfaAfL96 | usUfsaUfaGfaGfcAfag(Ath)AfcAfcUfgUfususu | 71.66 | −3.36 |
| AD-134031.1 | AfsasCfaGfuGfuUf(Cth) UfuGfcUfcUfaUfaAfL96 | usUfsaUfaGfaGfcAfa(Gth)aAfcAfcUfgUfususu | 71.02 | −4 |
| AD-134032.1 | AfsasCfaGfuGfuUfCf(Tth)uGfcUfcUfaUfaAfL96 | usUfsaUfaGfaGfcAf(Ath)gaAfcAfcUfgUfususu | 74.02 | −1 |
| AD-134033.1 | AfsasCfaGfuGfuUfCfUf(Tth)GfcUfcUfaUfaAfL96 | usUfsaUfaGfaGfc(Ath)agaAfcAfcUfgUfususu | 73.12 | −1.9 |
| AD-134034.1 | AfsasCfaGfuGfuUfCfUfu(Gth)cUfcUfaUfaAfL96 | usUfsaUfaGfaGf(Cth)AfagaAfcAfcUfgUfususu | 73.52 | −1.5 |
| AD-134035.1 | AfsasCfaGfuGfuUfCfUfuGf(Cth)UfcUfaUfaAfL96 | usUfsaUfaGfa(Gth)cAfagaAfcAfcUfgUfususu | 71.02 | −4 |
| AD-134036.1 | AfsasCfaGfuGfuUfCfUfuGfc(Tth)cUfaUfaAfL96 | usUfsaUfaGf(Ath)GfcAfagaAfcAfcUfgUfususu | | |
| AD-134037.1 | AfsasCfaGfuGfuUfCfUfuGfcUf(Cth)UfaUfaAfL96 | usUfsaUfa(Gth)aGfcAfagaAfcAfcUfgUfususu | 72.12 | −2.9 |
| AD-134038.1 | AfsasCfaGfuGfuUfCfUfuGfcUfc(Tth)aUfaAfL96 | usUfsaUf(Ath)GfaGfcAfagaAfcAfcUfgUfususu | 73.32 | −1.7 |
| AD-134039.1 | AfsasCfaGfuGfuUfCfUfuGfcUfcUf(Ath)UfaAfL96 | usUfsa(Tth)aGfaGfcAfagaAfcAfcUfgUfususu | 74.52 | −0.5 |
| AD-134040.1 | AfsasCfaGfuGfuUfCfUfuGfcUfcUfa(Tth)aAfL96 | usUfs(Ath) UfaGfaGfcAfagaAfcAfcUfgUfususu | 76.66 | 1.64 |
| AD-134041.1 | AfsasCfaGfuGfuUfCfUfuGfcUfcUfaUf(Ath)AfL96 | us(Tths)aUfaGfaGfcAfagaAfcAfcUfgUfususu | 78.02 | 3 |
| AD-134042.1 | AfsasCfaGfuGfuUfCfUfuGfcUfcUfaUfa(Ath)L96 | (Tths) UfsaUfaGfaGfcAfagaAfcAfcUfgUfususu | 78.02 | 3 |

[0906] Stability of modified oligonucleotides toward 3′- or 5′-specific exonucleases: Modified oligonucleotides were prepared in a final concentration of 0.1 mg/mL in either 300 mM Tris (pH 7.2), 60 mM MgCl₂ or 300 mM sodium acetate (pH 6.5), 60 mM MgCl₂ for assessing the stability towards 3′- or 5′-specific exonucleases, respectively. The exonuclease (15 mU/mL SVPDE for 3′-stability or 500 mU/mL phosphodiesterase II for 5′-stability) was added immediately prior to analysis via IEX HPLC (dionex DNAPac PA200, 4×250 mm) using a gradient of 31-52% mobile phase (1 M NaBr, 20 mM sodium phosphate, pH 11, 15% MeCN; stationary phase: 20 mM sodium phosphate, 15% MeCN, pH 11) over 16 min with a flow of 1 mL/min. Samples were analyzed at given time points for up to 24 h. The quantity of full length oligonucleotides was determined as the area under the curve at A₂₆₀. Percent full length oligonucleotides was calculated by dividing by the area under the curve at t=0 and multiplying by 100. Activity of enzyme was verified for each experiment by including a oligodeoxythymidylate with a terminal phosphorothioate linkage (5′-T₁₉·T (SEQ ID NO: 708) or 5′-T·T₁₉ (SEQ ID NO: 708) for 3′- or 5′-exonuclease activity, respectively). Each aliquot of enzyme was thawed just prior to the experiment. The half-life was determined by fitting to first order kinetics.

[0907] FIG. 34 shows plots of mUNA oligo stability towards 3′-specific exonuclease (SVPD). FIG. 35 shows plots of mUNA oligo stability towards 5′-specific exonuclease (Phosphodiesterase II). FIG. 36 shows a line graph of Stability of TNA-T against 5′-exonuclease (phosphodiesterase II) degradation.

TABLE 32
In vitro reporter assays for antisense
strand modified duplexes (position 7).

| | | On-Target | Off-Target |
|---|---|---|---|
| | | IC₅₀ (nM) | IC₅₀ (nM) |
| TTR-4 | Parent (AD-125773) | 0.136 | 1.21 |
| | (S)-GNA | 0.176 | 10.8 |
| | 5′-(S)-mUNA Mod 5 (S): Y95 | 0.0421 | 8.73 |
| | 5′-(R)-mUNA Mod 5 (R): Y97 | 0.0898 | 8.13 |
| | 2′-(S)-mUNA Mod 7 (S): Y96 | 0.0486 | 1.35 |
| | 2′-(R)-mUNA Mod 7 (R): Y98 | 0.0277 | 1.61 |
| | 3′-(S)-mUNA Mod 6 (S): Y99 | 0.0239 | 3.65 |
| | 3′-(R)-mUNA Mod 6 (R): Y100 | 0.0358 | 2.86 |
| | UNA | 0.0463 | 1.80 |

[0908] On-target activity measured in primary mouse hepatocytes via transfection at the indicated concentrations. Off-target IC50s measured using luciferase reporter plasmids which were co-transfected with siRNAs into COS-7 cells.

TABLE 33
In vitro reporter assays for antisense
strand modified duplexes (position 5).

| | | On-Target | Off-Target |
|---|---|---|---|
| | | IC₅₀ (nM) | IC₅₀ (nM) |
| TTR-3 | Parent (AD-125762) | 0.0502 | >50 |
| | (S)-GNA | 0.00298 | >50 |
| | 5′-(S)-mUNA Mod 5 (S): Y95 | 0.00110 | >50 |
| | 5′-(R)-mUNA Mod 5 (R): Y97 | 0.00147 | >50 |
| | 2′-(S)-mUNA Mod 7 (S): Y96 | 0.00254 | >50 |
| | 2′-(R)-mUNA Mod 7 (R): Y98 | 0.00064 | >50 |
| | 3′-(S)-mUNA Mod 6 (S): Y99 | 0.00316 | >50 |
| | 3′-(R)-mUNA Mod 6 (R): Y100 | 0.00157 | >50 |
| | 4′-OMe-mUNA: Y101 | 0.00488 | >50 |
| | UNA | 0.00064 | >50 |

[0909] On-target activity measured in primary mouse hepatocytes via transfection at the indicated concentrations. Off-target IC50s measured using luciferase reporter plasmids which were co-transfected with siRNAs into COS-7 cells.

TABLE 34
In vitro reporter assays for antisense
strand modified duplexes (position 7).

| | | On-Target | Off-Target |
|---|---|---|---|
| | | IC₅₀ (nM) | IC₅₀ (nM) |
| TTR-3 | Parent (AD-125762) | 0.0502 | >50 |
| | (S)-GNA | 0.0160 | >50 |
| | 5′-(S)-mUNA Mod 5 (S): Y95 | 0.0150 | >50 |
| | 5′-(R)-mUNA Mod 5 (R): Y97 | 0.0138 | >50 |
| | 2′-(S)-mUNA Mod 7 (S): Y96 | 0.0235 | >50 |
| | 2′-(R)-mUNA Mod 7 (R): Y98 | 0.0186 | >50 |
| | 3′-(S)-mUNA Mod 6 (S): Y99 | 0.0322 | >50 |
| | 3′-(R)-mUNA Mod 6 (R): Y100 | 0.0348 | >50 |
| | 4′-OMe-mUNA: Y101 | 0.0391 | >50 |
| | UNA | 0.0115 | >50 |

[0910] On-target activity measured in primary mouse hepatocytes via transfection at the indicated concentrations. Off-target IC50s measured using luciferase reporter plasmids which were co-transfected with siRNAs into COS-7 cells.

[0911] TTR in vitro gene silencing with Hyp-based Nucleosides was studied. Sequences used are shown in Table 35. FIG. 37 shows the structure of Hyp monomers.

TABLE 35
TTR in vitro gene silencing with Hyp-based Nucleosides (Table 35 discloses SEQ ID
NOS 615-636, respectively, in order of columns)

| AD- | TTR | A-128009.25 [symbol] | asascaguGfuUfCfU | A-126312.73 | usUfsauaGfagcaagaAfcAfcuguususu |
|---|---|---|---|---|---|
| 64958.64 | | | fugcucuauaaL96 | | |
| AD- | TTR | A-128009.25 [symbol] | asascaguGfuUfCfU | A-594468.1 | usUfsaQ198aGfagcaagaAfcAfcuguususu |
| 307612.2 | | | fugcucuauaaL96 | | |
| AD- | TTR | A-128009.25 [symbol] | asascaguGfuUfCfU | A-594467.1 | usUfsa(Thp)aGfagcaagaAfcAfcuguususu |
| 307611.2 | | | fugcucuauaaL96 | | |
| AD- | TTR | A-128009.25 [symbol] | asascaguGfuUfCfU | A-173412.2 | usUfsauQ198GfagcaagaAfcAfcuguususu |
| 307614.2 | | | fugcucuauaaL96 | | |
| AD- | TTR | A-128009.25 [symbol] | asascaguGfuUfCfU | A-594469.1 | usUfsau(Ahp)GfagcaagaAfcAfcuguususu |
| 307613.2 | | | fugcucuauaaL96 | | |
| AD- | TTR | A-128009.26 [symbol] | asascaguGfuUfCfU | A-173413.2 | usUfsauaQ198agcaagaAfcAfcuguususu |
| 307616.2 | | | fugcucuauaaL96 | | |
| AD- | TTR | A-128009.26 [symbol] | asascaguGfuUfCfU | A-594470.1 | usUfsaua(Ghp)agcaagaAfcAfcuguususu |
| 307615.2 | | | fugcucuauaaL96 | | |
| AD- | TTR | A-128009.26 [symbol] | asascaguGfuUfCfU | A-173414.2 | usUfsauaGfQ198gcaagaAfcAfcuguususu |
| 133416.3 | | | fugcucuauaaL96 | | |
| AD- | TTR | A-128009.26 [symbol] | asascaguGfuUfCfU | A-594471.1 | usUfsauaGf(Ahp)gcaagaAfcAfcuguususu |
| 307617.2 | | | fugcucuauaaL96 | | |
| AD- | TTR | A-128009.26 [symbol] | asascaguGfuUfCfU | A-173415.2 | usUfsauaGfaQ198caagaAfcAfcuguususu |
| 133417.3 | | | fugcucuauaaL96 | | |
| AD- | TTR | A-128009.26 [symbol] | asascaguGfuUfCfU | A-594472.1 | usUfsauaGfa(Ghp)caagaAfcAfcuguususu |
| 307618.2 | | | fugcucuauaaL96 | | |

[symbol]

indicates data missing or illegible when filed

[0912] FIG. 38 shows a plot of TTR DW1105 Free Uptake Sorted by 100 nM.

[0913] GO1 in vitro gene silencing with Hyp-based Nucleosides. Sequences used are shown in Table 36. Transfection results are summarized in Table 37.

TABLE 36
shows in vitro gene silencing with Hyp-based Nucleosides (Table 36 discloses SEQ ID
NOS 637-666, respectively, in order of columns)

| Duplex | | | | |
|---|---|---|---|---|
| Name | senseOligo | Sense oligoSeq | antisOligo | Antisense oligoSeq |
| AD- | A- | gsasauguGfaaAfGfucaucg | A- | usUfsgucGfaUfGfacuuUfcAfcauu |
| 65644.56 | 131560.208 | acaaL96 | 131569.40 | csusg |
| AD- | A- | gsasauguGfaaAfGfucaucg | A- | usUfsQ198ucGfaUfGfacuuUfcAfc |
| 307622.1 | 131560.1 | acaaL96 | 594476.1 | auucsusg |
| AD- | A- | gsasauguGfaaAfGfucaucg | A- | usUfs(Ghp)ucGfaUfGfacuuUfcAfc |
| 307621.1 | 131560.1 | acaaL96 | 594475.1 | auucsusg |
| AD- | A- | gsasauguGfaaAfGfucaucg | A- | usUfsgQ198cGfaUfGfacuuUfcAfc |
| 307624.1 | 131560.1 | acaaL96 | 594478.1 | auucsusg |
| AD- | A- | gsasauguGfaaAfGfucaucg | A- | usUfsg(Thp)cGfaUfGfacuuUfcAfc |
| 307623.1 | 131560.1 | acaaL96 | 594477.1 | auucsusg |
| AD- | A- | gsasauguGfaaAfGfucaucg | A- | usUfsguQ198GfaUfGfacuuUfcAfc |
| 79731.3 | 131560.214 | acaaL96 | 157540.2 | auucsusg |
| AD- | A- | gsasauguGfaaAfGfucaucg | A- | usUfsgu(Chp)GfaUfGfacuuUfcAfc |
| 307625.1 | 131560.1 | acaaL96 | 594479.1 | auucsusg |
| AD- | A- | gsasauguGfaaAfGfucaucg | A- | usUfsgucQ198aUfGfacuuUfcAfca |
| 79732.3 | 131560.216 | acaaL96 | 157541.2 | uucsusg |
| AD- | A- | gsasauguGfaaAfGfucaucg | A- | usUfsguc(Ghp)aUfGfacuuUfcAfca |
| 307626.1 | 131560.1 | acaaL96 | 594480.1 | uucsusg |
| AD- | A- | gsasauguGfaaAfGfucaucg | A- | usUfsgucGfQ198UfGfacuuUfcAfc |
| 79733.3 | 131560.218 | acaaL96 | 157542.2 | auucsusg |
| AD- | A- | gsasauguGfaaAfGfucaucg | A- | usUfsgucGf(Ahp)UfGfacuuUfcAfc |
| 307627.1 | 131560.1 | acaaL96 | 594481.1 | auucsusg |
| AD- | A- | gsasauguGfaaAfGfucaucg | A- | usUfsgucGfaQ198GfacuuUfcAfca |
| 79734.2 | 131560.220 | acaaL96 | 157543.2 | uucsusg |
| AD- | A- | gsasauguGfaaAfGfucaucg | A- | usUfsgucGfa(Thp)GfacuuUfcAfca |
| 307628.1 | 131560.1 | acaaL96 | 594482.1 | uucsusg |
| AD- | A- | gsasauguGfaaAfGfucaucg | A- | usUfsgucGfaUfQ198acuuUfcAfca |
| 307630.1 | 131560.1 | acaaL96 | 594484.1 | uucsusg |
| AD- | A- | gsasauguGfaaAfGfucaucg | A- | usUfsgucGfaUf(Ghp)acuuUfcAfca |
| 307629.1 | 131560.1 | acaaL96 | 594483.1 | uucsusg |

TABLE 37
Summary of Transfection Data

| Transfection Lipofecatamine RNAi Max | | | | | Free Uptake | | | |
|---|---|---|---|---|---|---|---|---|
| DuplexID | 10 nM avg | stdev | 1 nM avg | stdev | 100 nM avg | stdev | 10 nM avg | stdev |
| AD-65644.56 | 29.31 | 4.57 | 69.13 | 11.95 | 50.83 | 5.89 | 75.69 | 15.45 |
| AD-307622.1 | 88.33 | 10.52 | 95.64 | 8.55 | 77.77 | 9.32 | 95.75 | 5.74 |
| AD-307621.1 | 77.53 | 6.67 | 99.29 | 21.13 | 71.37 | 12.67 | 85.72 | 12.97 |
| AD-307624.1 | 46.38 | 10.86 | 65.47 | 4.47 | 35.79 | 4.49 | 70.71 | 11.88 |
| AD-307623.1 | 44.82 | 11.32 | 58.87 | 9.56 | 42.79 | 12.66 | 69.34 | 8.79 |
| AD-79731.3 | 21.16 | 5.72 | 30.52 | 8.50 | 23.23 | 8.11 | 28.14 | 3.38 |
| AD-307625.1 | 13.33 | 4.62 | 48.54 | 6.89 | 14.25 | 3.10 | 29.87 | 4.60 |
| AD-79732.3 | 27.23 | 6.56 | 66.07 | 5.19 | 32.58 | 4.45 | 49.26 | 3.70 |
| AD-307626.1 | 25.27 | 4.22 | 67.26 | 11.98 | 29.18 | 1.39 | 45.34 | 9.25 |
| AD-79733.3 | 20.85 | 4.68 | 56.48 | 3.60 | 32.37 | 5.98 | 54.74 | 5.19 |
| AD-307627.1 | 13.48 | 1.86 | 61.15 | 14.49 | 26.84 | 8.42 | 61.67 | 3.77 |
| AD-79734.2 | 62.55 | 12.23 | 108.90 | 20.01 | 74.62 | 5.98 | 98.33 | 9.78 |
| AD-307628.1 | 31.92 | 2.64 | 86.18 | 14.10 | 45.23 | 4.75 | 72.39 | 8.91 |
| AD-307630.1 | 101.07 | 5.58 | 131.38 | 9.03 | 92.59 | 10.68 | 87.94 | 4.58 |
| AD-307629.1 | 38.85 | 10.20 | 87.79 | 14.73 | 55.91 | 16.56 | 70.17 | 5.57 |

[0914] Results of in vivo gene silencing with Hyp-based Nucleosides are shown in FIGS. 39-41. As shown in FIG. 42, incorporation of (S)-isoGNA is significantly less thermally destabilizing than (S)-GNA. As seen from FIG. 43, incorporation of (S′)-isoGNA generally improves in vivo activity over (S)-GNA.

### Example 13: Incorporation of Mod 8 (2′-5′ RNA) in Antisense Seed Region

[0915] Mod 8 (2′-5′ RNA) was incorporated in the antisense seed region and its effects studied. FIG. 44 shows that incorporation of Mod 8 (2′-5′-RINA) in antisense seed region improved clinical pathology measures in rat toxicity study. Clinical pathology parameters in rats after subcutaneous administration of a single dose (30 mg/kg) of a parent siRNA or siRNA containing a single Mod 8 (2′-5′ RNA) are summarized in Table 38.

TABLE 38
Clinical pathology parameters in rats after subcutaneous administration of a single dose
(30 mg/kg) of a parent siRNA or siRNA containing a single Mod 8 (2′-5′ RNA linkage)

| | | | Parent | | 2′-5′-RNA @ AS7 | | Parent | | 2′-5′-RNA @ AS7 | |
|---|---|---|---|---|---|---|---|---|---|---|
| | 0.9% NaCl | | (AD-65644)* | | (AD-227798) | | (AD-64958) | | (AD-227768) | |
| | | St. | | St. | | St. | | St. | | St. |
| | Avg. | Dev. | Avg. | Dev. | Avg. | Dev. | Avg. | Dev. | Avg. | Dev. |
| ALT | 38 | 7 | 47 | 14 | 45 | 10 | 108 | 37 | 49 | 9 |
| (U/L) | | | | | | | | | | |
| AST | 91 | 24 | 180 | 55 | 83 | 6 | 332 | 86 | 88 | 12 |
| (U/L) | | | | | | | | | | |
| ALB | 3.1 | 0.1 | 3.0 | 0.1 | 3.1 | 0.1 | 2.9 | 0.1 | 3.0 | 0.1 |
| (g/dL) | | | | | | | | | | |
| ALP | 239 | 35 | 449 | 150 | 275 | 34 | 427 | 110 | 224 | 47 |
| (U/L) | | | | | | | | | | |
| BILI | 0.12 | 0.03 | 0.52 | 0.40 | 0.11 | 0.01 | 0.48 | 0.33 | 0.12 | 0.01 |
| (mg/dL) | | | | | | | | | | |
| CA | 10.0 | 0.3 | 10.3 | 0.2 | 9.9 | 0.2 | 9.9 | 0.2 | 10.2 | 0.2 |
| (mg/dL) | | | | | | | | | | |
| UREAN | 14.3 | 1.5 | 16.8 | 3.6 | 14.6 | 1.2 | 18.6 | 2.6 | 16.5 | 4.1 |
| (mg/dL) | | | | | | | | | | |
| CHOL | 58 | 10 | 74 | 18 | 50 | 11 | 43 | 10 | 34 | 10 |
| (mg/dL) | | | | | | | | | | |
| CL | 100 | 2 | 100 | 3 | 102 | 2 | 102 | 2 | 103 | 2 |
| (mmol/L) | | | | | | | | | | |
| CREAT | 0.22 | 0.03 | 0.23 | 0.03 | 0.22 | 0.02 | 0.21 | 0.02 | 0.23 | 0.03 |
| (mg/dL) | | | | | | | | | | |
| GLUC | 118 | 18 | 113 | 12 | 148 | 6 | 124 | 5 | 121 | 7 |
| (mg/dL) | | | | | | | | | | |
| PHOS | 8.5 | 0.4 | 8.8 | 0.5 | 8.2 | 0.4 | 9.0 | 1.2 | 8.8 | 0.6 |
| (mg/dL) | | | | | | | | | | |
| TRIG | 65 | 33 | 138 | 88 | 120 | 31 | 51 | 5 | 52 | 7 |
| (mg/dL) | | | | | | | | | | |
| K | 4.6 | 0.2 | 4.3 | 0.2 | 4.4 | 0.1 | 4.9 | 0.3 | 4.8 | 0.1 |
| (mmol/L) | | | | | | | | | | |
| NA | 141 | 1 | 140 | 1 | 142 | 1 | 140 | 1 | 142 | 1 |
| (mmol/L) | | | | | | | | | | |
| GLDH | 7.7 | 1.5 | 77.5 | 18.4 | 11.6 | 6.8 | 140.8 | 55.8 | 16.3 | 6.6 |
| (U/L) | | | | | | | | | | |
| PROT | 6 | 0.0 | 6 | 0.6 | 6 | 0.6 | 5 | 0.0 | 6 | 0.5 |
| (g/dL) | | | | | | | | | | |
| GLOB | 2.65 | 0.10 | 2.63 | 0.12 | 2.43 | 0.17 | 2.27 | 0.12 | 2.63 | 0.22 |
| (g/dL) | | | | | | | | | | |
| A/G | 1.1 | 0.0 | 1.1 | 0.1 | 1.3 | 0.1 | 1.3 | 0.1 | 1.2 | 0.1 |

All values represent the average across all four animals from each cohort.
*One animal from this group was euthanized early due to concerning clinical observations and this data was not included in this analysis.

### Example 14: Alternate 3′-mUNA Synthesis

[0916] Scheme 43 shows synthesis of 3′-methyl-UNA-uridine phosphoramidites.

[chemical structure]

[0917] Compound 402: To the solution of 1-O-acetyl-2,3,5-tri-O-benzoyl-L-rhamnofuranose (401) (3.70 g, 7.14 mmol; Lerner, L. M. J. Org. Chem. 1976, 41, 306-310) and uracil (1.61 g, 14.3 mmol) in MeCN (80 mL), N,O-bis(trimethylsilyl)acetamide (10.6 mL, 42.9 mmol) was added. The mixture was refluxed for 1 h and Me₃SiOTf (1.55 mL, 8.57 mmol) was added dropwisely at room temperature. After refluxing again for 1 h, the mixture was quenched with saturated NaHCO₃ solution (100 mL), evaporated and extracted with CH₂Cl₂. The organic layer was dried over MgSO₄, concentrated and purified via column chromatography on silica gel (25% AcOEt in hexane) to afford compound 402 as white foam (3.22 g, 79%, R_{f}=0.15; developed with 25% AcOEt in hexane). ¹H NMR (500 MHz, DMSO-d₆) δ 11.46 (d, J=2.0 Hz, 1H), 7.95-7.30 (m, 16H), 6.26-6.19 (m, 2H), 6.10-6.07 (m, 1H), 5.73 (dd, J=8.5, 2.0 Hz, 1H), 5.41-5.34 (m, 1H), 5.05 (dd, J=8.5, 3.0 Hz, 1H), 1.43 (d, J=6.0 Hz, 3H). ¹³C NMR (126 MHz, DMSO-d₆) δ 164.59, 164.53, 164.41, 163.12, 150.61, 142.42, 133.90, 133.83, 133.42, 129.29, 129.22, 129.16, 129.10, 128.82, 128.65, 128.61, 128.59, 128.24, 102.34, 89.13, 81.75, 74.11, 71.96, 67.81, 17.22. HRMS; [M+H]⁺ calc. for C₃₁H₂₇N₂O₉Na, 593.1536; found: 59.

[0918] Compound 403: Compound 402 (9.60 g, 16.8 mmol) was dissolved in 1N NH₃ MeOH solution (168 mL). The resulting mixture was stirred for 3 d at room temperature and then evaporated. The crude residue was purified via column chromatography on silica gel (10% MeOH in AcOEt) to afford compound 403 as white powder (3.41 g, 80%, R_{f}=0.23; developed with 10% MeOH in AcOEt). ¹H NMR (400 MHz, DMSO-d₆) δ 11.29 (brs, 1H), 7.75 (d, J=11.5 Hz, 1H), 5.77 (d, J=8.5 Hz, 1H), 5.64 (d, J=10.0 Hz, 1H), 5.33 (d, J=8.0 Hz, 1H), 5.03 (d, J=1.5 Hz, 1H), 4.56 (d, J=6.5 Hz, 1H), 4.39-4.31 (m, 1H), 4.06 (brs, 1H), 3.91 (dd, J=3.0, 10.5 Hz, 1H), 3.86-3.76 (m, 1H), 1.05 (d, J=7.5 Hz, 3H). ¹³C (126 MHz, DMSO-d₆) δ 163.11, 150.95, 141.90, 102.07, 88.24, 85.40, 74.32, 70.52, 63.45, 20.53. HRMS; [M+H]⁺ calc. for C₁₀H₁₅N₂O₆, 259.0930; found: 259.0931.

[0919] Compound 404: To the solution of compound 403 (640 mg, 2.48 mmol) in a mixture of 1,4-dioxane (25 mL) and water (5 mL), NaIO₄ (591 mg, 2.72 mmol) was added. The reaction mixture was stirred for 1.5 h at room temperature and then diluted with 1,4-dioxane and filtered through a Celite pad. The solid residue was washed with 1,4-dioxane, and then sodium borohydrate (94.0 mg, 2.48 mmol) was added to the filtrate. the resulting mixture was stirred for 15 min. and the solvent was removed in vacuo. The crude residue was purified via column chromatography on silica gel (10-20% MeOH in AcOEt) to afford compound 404 as a colorless sticky glass (548 mg, 85%, R_{f}=0.34; developed with 15% MeOH in AcOEt). ¹H NMR (400 MHz, DMSO-d₆) δ 11.16 (brs, 1H), 7.60 (d, J=8.0 Hz, 1H), 5.83 (m, 1H), 5.55 (d, J=8.0 Hz, 1H), 5.06 (m, 1H), 4.68 (d, J=5.2 Hz, 1H), 4.49-4.41 (m, 1H), 3.76-3.67 (m, 1H), 3.65-3.46 (m, 1H), 3.38-3.21 (m, 3H), 1.05 (d, J=6.4 Hz, 1H). ¹³C NMR (101 MHz, DMSO-d₆) δ 163.49, 151.39, 141.61, 101.00, 84.33, 83.90, 65.85, 61.46, 60.73, 18.25. HRMS; [M+H]⁺ calc. for C₁₀H₁₆N₂O₆Na, 283.0906; found: 283.0916.

[0920] Compound 405: To the solution of compound 404 (2.04 g, 7.84 mmol) in dry pyridine 80 mL were added DMTrCl (2.89 g, 8.63 mmol) and 4-dimethylaminopyridine (95.8 mg, 0.784 mmol). The reaction mixture was stirred for 12 h at room temperature and then diluted with CH₂Cl₂. The reaction was quenched with saturated aq.NaHCO₃. Organic layer was separated and washed with brine. The solvent was removed in vacuo. The crude residue was purified via column chromatography on silica gel (AcOEt) to afford compound 405 as a white form (1.32 g, 30%, R_{f}=0.52; developed with AcOEt). ¹H NMR (400 MHz, DMSO-d₆) δ 11.31 (d, J=1.2 Hz, 1H), 7.58 (d, J=8.0 Hz, 1H), 7.35-7.10 (m, 9H), 6.88-6.81 (m, 4H), 5.89-5.80 (m, 1H), 5.46 (dd, J=1.2, 8.0 Hz, 1H), 5.13-5.06 (m, 1H), 4.72 (d, J=4.8 Hz, 1H), 3.78-3.52 (m, 10H), 3.04-2.78 (m, 2H), 0.87 (d, J=6.4 Hz, 3H). ¹³C NMR (101 MHz, DMSO-d₆) δ 163.28, 157.98, 157.96, 151.51, 144.82, 141.23, 135.66, 135.54, 129.58, 129.49, 127.77, 127.61, 126.58, 113.14, 113.11, 101.67, 85.45, 84.42, 82.56, 66.08, 63.02, 61.01, 55.03, 55.00, 18.09. HRMS; [M+Na]⁺ calc. for C₃₁H₃₄N₂O₈Na, 585.2213; found: 585.2205.

[0921] Compound 406: To the solution of compound 405 (500 mg, 0.890 mmol) in dry pyridine 8.5 mL were added benzoic anhydride (211 mg, 0.979 mmol) and 4-dimethylaminopyridine (10.9 mg, 0.0890 mmol) at 0° C. The reaction mixture was stirred for 5 h at room temperature and then diluted with CH₂Cl₂. The reaction was quenched with saturated aq. NaHCO₃. Organic layer was separated and washed with brine. The solvent was removed in vacuo. The crude residue was purified via column chromatography on silica gel (50% AcOEt in hexane) to afford compound 406 as a white form (474 g, 80%, R_{f}=0.34; developed with 50% AcOEt in hexane). ¹H NMR (400 MHz, DMSO-d₆) δ 11.43 (d, J=2.0 Hz, 1H), 7.96-7.82 (m, 2H), 7.82-7.43 (m, 4H), 7.41-7.04 (m, 9H), 7.02-6.73 (m, 4H), 6.32-6.12 (m, 1H), 5.51 (d, J=8.1 Hz, 1H), 4.84 (d, J=4.5 Hz, 1H), 4.65 (dd, J=11.6, 5.2 Hz, 1H), 4.49 (dd, J=11.5, 6.8 Hz, 1H), 3.79-3.61 (m, 8H), 3.17-2.74 (m, 2H), 0.90 (d, J=6.4 Hz, 3H). ¹³C NMR (101 MHz, DMSO-d₆) δ 165.02, 163.10, 157.99, 157.97, 151.10, 144.75, 140.70, 135.56, 135.46, 133.65, 129.58, 129.49, 129.16, 129.01, 128.84, 127.77, 127.60, 126.61, 113.13, 102.13, 85.58, 82.81, 81.64, 66.08, 63.34, 62.94, 55.01, 54.98, 17.91. HRMS; [M+Na]⁺ calc. for C₃₈H₃₈N₂O₉Na, 689.2475; found: 689.2505.

[0922] Compound 407: To the solution of compound 406 (2.50 g, 3.75 mmol) in dry DCM 38 mL were added DIPEA (1.97 mL, 11.3 mmol) and 2-cyanoethylchloro-N,N-diisopropylphosphoramidite (921 μL, 14.1 mmol) dropwisely. The reaction mixture was stirred for 1 h at room temperature and then diluted with DCM. Quenched the reaction with saturated aq.NaHCO₃. Organic layer was separated and washed with brine. The solvent was removed in vacuo. The crude residue was purified via column chromatography on silica gel to afford a mixture of diastereomers 407 as a colorless form (2.79 g, 86%, R_{f}=0.23; developed with 40% AcOEt in hexane). ¹H NMR (500 MHz, Acetonitrile-d₃) δ 9.20 (brs, 1H); 7.99-7.93 (m, 2H), 7.64-7.18 (m, 13H), 6.85-6.80 (m, 4H), 6.34-6.28 (m, 1H), 5.49 (d, J=8.0 Hz, 1H), 4.59-4.40 (m, 2H), 4.19-4.05 (m, 1H), 3.79-3.48 (m, 12H), 3.19-3.09 (m, 2H), 2.62-2.57 (m, 2H), 1.16-1.01 (m, 15H). ¹³C NMR (126 MHz, Acetonitrile-d₃) δ 166.44, 163.94, 159.62, 159.59, 151.90, 151.82, 145.97, 145.95, 141.46, 141.41, 136.80, 136.77, 136.73, 134.38, 130.91, 130.89, 130.84, 130.80, 130.46, 130.44, 130.43, 129.60, 128.88, 128.82, 128.79, 127.77, 119.52, 114.03, 114.01, 103.05, 103.00, 87.48, 87.45, 83.30, 83.26, 83.08, 82.99, 82.89, 82.86, 71.64, 71.51, 71.35, 71.21, 64.76, 64.72, 64.09, 64.06, 59.52, 59.37, 59.14, 58.99, 55.87, 55.86, 43.88, 43.87, 43.79, 43.77, 25.05, 24.99, 24.93, 24.87, 24.81, 24.79, 24.73, 21.02, 20.98, 20.96, 20.92, 17.40, 17.39, 17.22, 17.19. ³¹P NMR (202 MHz, Acetonitrile-d₃) δ 148.94; 148.75. HRMS; [M+H]⁺ calc. for C₄₇H₅₆N₄O₁₀P, 867.3734; found: 867.3742.

[0923] Compound 409: To the solution of compound 405 (500 g, 0.890 mmol) in dry THE 9 mL were added PPh₃ (622 mg, 2.67 mmol), benzoic acid (543 mg, 4.45 mmol) and DIAD (526 μL, 2.67 mmol) dropwisely. The reaction mixture was stirred for 5 h at room temperature, the reaction completion was checked by TLC. The solvent was removed in vacuo. The crude residue was purified via column chromatography on silica gel (5-10% MeOH in AcOEt) to afford a 2,2′-anhydro-nucleoside 408 (R_{f}=0.11; developed with AcOEt). ¹H NMR (400 MHz, DMSO-d₆) δ 7.93 (d, J=7.6 Hz, 1H), 7.88-7.84 (m, 2H), 7.70-7.64 (m, 1H), 7.53-7.48 (m, 2H) 7.36-7.16 (m, 9H), 6.85-6.76 (m, 4H), 6.13 (dd, J=5.6, 1.6 Hz, 1H), 5.76 (dt, J=7.6, 12.4 Hz, 1H), 4.67 (dd, J=10.0, 5.6 Hz, 1H), 4.51-4.41 (m, 2H), 3.70 (s, 3H), 3.69 (s, 3H), 3.26 (dd, J=10.0, 3.6 Hz, 1H), 2.96 (dd, J=10.4, 5.2 Hz, 1H), 1.15 (d, J=7.2 Hz, 3H). ¹³C NMR (101 MHz, DMSO-d₆) δ 171.00, 164.91, 160.23, 158.12, 158.05, 144.55, 136.77, 135.10, 135.05, 133.52, 129.62, 129.48, 129.16, 128.78, 127.86, 127.51, 126.75, 113.18, 108.72, 87.62, 85.63, 80.12, 73.40, 70.49, 62.56, 55.02, 54.98, 54.96, 15.37. HRMS; [M+H]⁺ calc. for C₃₈H₃₇N₂O₈, 649.2550; found: 649.2546. Compound 408 was dissolved in THF 10 mL. To the solution of mixture was added 1N aq. NaOH 3 mL dropwisely. Resulting mixture was stirred for 12 h. The solvent was removed in vacuo. The crude residue was purified via column chromatography on silica gel (0-5% MeOH in AcOEt) to afford compound 409 as a white form (452 g, 90% over 2 steps, R_{f}=0.32; developed with AcOEt). ¹H NMR (500 MHz, DMSO-d₆) δ 11.39 (brs, 1H), 7.63 (d, J=8.0 Hz, 1H), 7.39-7.04 (m, 9H), 6.97-6.67 (m, 4H), 5.82 (t, J=5.9 Hz, 1H), 5.49 (d, J=8.0 Hz, 1H), 5.23-5.16 (m, 1H), 4.77 (d, J=4.8 Hz, 1H), 3.84-3.46 (m, 10H), 3.06-2.84 (m, 2H), 0.86 (d, J=6.4 Hz, 3H). ¹³C NMR (101 MHz, DMSO-d₆) δ 163.27, 157.97, 157.95, 151.44, 144.81, 141.22, 135.58, 135.56, 129.61, 129.52, 127.75, 127.63, 126.57, 113.10, 101.73, 85.31, 84.80, 83.02, 65.90, 62.88, 61.16, 55.00, 54.98, 18.55. HRMS; [M+Na]⁺ calc. for C₃₁H₃₄N₂O₈Na, 585.2213; found: 585.2205.

[0924] Compound 410: To the solution of compound 409 (2.00 g, 3.56 mmol) in dry pyridine 36 mL were added DMAP (43.5 mg, 0.356 mmol) and Bz₂O (845 mg, 3.74 mmol). The reaction mixture was stirred for 5 h at room temperature and then the resulting mixture was diluted with DCM. The reaction was quenched with saturated aq.NaHCO₃. Organic layer was separated and washed with brine. The solvent was removed in vacuo. The crude residue was purified via column chromatography on silica gel (50% AcOEt in hexane) to afford compound 410 as a colorless form (1.99 g, 84%, R_{f}=0.34; developed with 50% AcOEt in hexane). ¹H NMR (400 MHz, DMSO-d₆) δ 11.45 (d, J=2.0 Hz, 1H), 7.99-7.41 (m, 6H), 7.41-7.03 (m, 9H), 6.95-6.58 (m, 4H), 6.20 (t, J=6.0 Hz, 1H), 5.54 (dd, J=7.6, 1.6 Hz, 1H), 4.86 (d, J=5.2 Hz, 1H), 4.70 (dd, J=12.0, 5.6 Hz, 1H), 4.51 (dd, J=12.0, 5.6 Hz, 1H), 3.86-3.52 (m, 8H), 3.10-2.91 (m, 2H), 0.84 (d, J=6.4 Hz, 3H). ¹³C NMR (101 MHz, DMSO-d₆) δ 165.03, 163.10, 157.98, 157.96, 151.11, 144.75, 140.76, 135.52, 135.49, 133.69, 129.61, 129.52, 129.12, 129.00, 128.87, 127.75, 127.62, 126.59, 113.10, 102.20, 85.40, 83.17, 81.90, 65.75, 63.40, 62.73, 55.00, 54.97, 18.49. HRMS; [M+Na]⁺ calc. for C₃₈H₃₈N2O₉Na, 689.2475; found: 689.2490.

[0925] Compound 411: To the solution of compound 410 (2.00 g, 3.00 mmol) in dry DCM 30 mL were added DIPEA (1.57 mL, 9.00 mmol) and 2-cyanoethylchloro-N,N-diisopropylphosphoramidite (737 μL, 3.30 mmol) dropwisely. The reaction mixture was stirred for 2 h at room temperature and then diluted with DCM. Quenched the reaction with saturated aq.NaHCO₃. Organic layer was separated and washed with brine. The solvent was removed in vacuo. The crude residue was purified via column chromatography on silica gel (50% AcOEt in hexane) to afford compound 411 as a colorless form (2.11 g, 81%, R_{f}=0.65; developed with 50% AcOEt in hexane). ¹H NMR (500 MHz, Acetonitrile-d₃) δ 8.00-7.94 (m, 2H), 7.64-7.16 (m, 13H), 6.86-6.81 (m, 4H), 6.28-6.22 (m, 1H), 5.56-5.48 (m, 1H), 4.69-4.44 (m, 3H), 4.23-4.03 (m, 1H), 3.86-3.42 (m, 12H), 3.31-3.04 (m, 2H), 2.61-2.51 (m, 2H), 1.28-0.98 (m, 15H). ¹³C NMR (126 MHz, Acetonitrile-d₃) δ 166.51, 164.07, 164.04, 159.66, 159.64, 151.98, 145.99, 141.49, 141.43, 136.89, 136.84, 136.83, 136.81, 134.54, 134.52, 131.03, 130.97, 130.47, 129.73, 129.02, 129.00, 128.85, 127.84, 127.82, 119.56, 114.11, 114.07, 103.34, 103.30, 87.26, 87.24, 83.19, 83.02, 82.99, 82.96, 82.87, 82.83, 70.43, 70.31, 64.84, 64.82, 64.01, 63.91, 59.32, 59.29, 59.17, 59.14, 58.19, 55.95, 44.06, 44.00, 43.96, 43.90, 25.09, 25.03, 24.99, 24.95, 24.94, 24.89, 24.82, 24.76, 22.03, 21.07, 21.02, 21.00, 20.95, 17.87, 17.84. ³¹P NMR (202 MHz, Acetonitrile-d₃) δ 149.10; 148.41. HRMS; [M+H]⁺ calc. for C₄₇H₅₆N₄O₁₀P, 867.3734; found: 867.3760.

[0926] All of the U.S. patents, U.S. patent application publications, foreign patents, foreign patent applications and non-patent publications referred to in this specification are incorporated herein by reference, in their entirety. Aspects of the embodiments can be modified, if necessary to employ concepts of the various patents, applications and publications to provide yet further embodiments.

[0927] These and other changes can be made to the embodiments in light of the above-detailed description. In general, in the following claims, the terms used should not be construed to limit the claims to the specific embodiments disclosed in the specification and the claims, but should be construed to include all possible embodiments along with the full scope of equivalents to which such claims are entitled. Accordingly, the claims are not limited by the disclosure.

We claim:

1. A double-stranded RNA (dsRNA) molecule comprising a sense strand and an antisense strand, each strand having 18 to 35 nucleotides, wherein
the dsRNA molecule has a duplex region of 17-30 nucleotide pairs in length;
the antisense strand has sufficient complementarity to a target sequence to mediate RNA interference;
the antisense strand comprises a thermally destabilizing modification at position 6 or 7 counting from the 5′-end of the antisense strand; and
the thermally destabilizing modification is of the formula, [chemical structure]
and
wherein the dsRNA molecule is optionally conjugated to a ligand.

2. The dsRNA molecule according to claim 1, wherein the duplex region is 19-23 base pairs in length.

3. The dsRNA molecule according to claim 1, comprising at least one ligand conjugated to the sense strand.

4. The dsRNA molecule according to claim 3, wherein at least one ligand is a targeting ligand.

5. The dsRNA molecule according to claim 4, wherein the targeting ligand is an ASGPR ligand that is conjugated to the 3′-end or 5′-end of the sense strand.

6. The dsRNA molecule according to claim 5, wherein the ASGPR ligand is one or more GalNAc derivatives attached through a bivalent or trivalent branched linker.

7. The dsRNA molecule of claim 6, wherein the ASGPR ligand is:

[chemical structure]

8. The dsRNA molecule according to claim 4, wherein the targeting ligand is a lipid, a cell targeting peptide, or a ligand that improves nuclease resistance of the dsRNA molecule.

9. The dsRNA molecule of claim 1, having a melting temperature of about 55° C. to about 67° C.

10. The dsRNA molecule of claim 1, having a blunt end at 5′-end of the antisense strand.

11. The dsRNA molecule of claim 10, having a blunt end at 3′-end of the antisense strand.

12. The dsRNA molecule of claim 10, having a single-stranded overhang of 1-10 nucleotides in length at the 3′-end of the antisense strand.

13. The dsRNA molecule of claim 1, wherein each strand is 19-25 nucleotides in length.

14. The dsRNA molecule of claim 1, wherein the sense strand has 21 nucleotides, and the antisense strand has 23 nucleotides.

15. The dsRNA molecule of claim 1, wherein the antisense strand comprises only 2, 3, 4, 5, or 6 2′-fluoro modifications.

16. The dsRNA molecule according to claim 15, wherein there are no 2′-fluoro modifications at nucleotide positions 3-9 of the antisense strand, counting from the 5′ end of the antisense strand.

17. The dsRNA molecule of claim 15, wherein the antisense strand has 2′-F modifications at positions 2, 14, and 16; or positions 2, 6, 14, and 16; or positions 2, 6, 8, 9, 14, and 16, counting from the 5′ end of the antisense strand.

18. The dsRNA molecule of claim 1, wherein the sense strand comprises only 2, 3, 4 or 5 2′-fluoro modifications.

19. The dsRNA molecule of claim 18, wherein the sense strand has 2′-F modifications at positions complimentary to positions 11, 12, and 15; or positions 11, 12, 13, and 15 of the antisense strand, counting from the 5′-end of the antisense strand.

20. The dsRNA molecule of claim 1, wherein the antisense strand comprises 1, 2, 3, or 4 phosphorothioate internucleotide linkages, and wherein at least the terminal two nucleotides at one end or both ends of the antisense strand are linked through phosphorothioate or methylphosphonate internucleotide linkages.

21. The dsRNA molecule of claim 20, wherein the terminal three nucleotides at one end or both ends of the antisense strand are linked through phosphorothioate internucleotide linkages.

22. The dsRNA molecule of claim 1, wherein the sense strand comprises 1, 2, 3, or 4 phosphorothioate internucleotide linkages, and wherein at least the terminal two nucleotides at one end or both ends of the sense strand are linked through phosphorothioate or methylphosphonate internucleotide linkages.

23. The dsRNA molecule of claim 1, wherein the terminal three nucleotides at one end or both ends of the sense strand are linked through phosphorothioate internucleotide linkages.

24. The dsRNA molecule of claim 1, the first base pair within the duplex region from the 5′-end of the antisense strand is an AU base pair.

25. The dsRNA molecule of claim 1, wherein the antisense strand comprises a 5′-(E)-vinyl phosphonate (VP).

26. The dsRNA molecule of claim 1, wherein the thermally destabilizing modification is at position 6 of the antisense strand, counting from the 5′end of the antisense strand.

27. The dsRNA molecule of claim 1, wherein the thermally destabilizing modification is at position 7 of the antisense strand, counting from the 5′end of the antisense strand.

28. A pharmaceutical composition comprising the dsRNA agent according to claim 1, alone or in combination with a pharmaceutically acceptable carrier or excipient.

29. A method for silencing a target gene in a cell, the method comprising a step of introducing the dsRNA molecule of claim 1 into the cell.

30. A method for delivering polynucleotide to a specific target in a subject by administering the dsRNA agent according to claim 1.

31. The method of claim 28, wherein said administering step is carried out by an administration means comprising intramuscular, intrabronchial, intrapleural, intraperitoneal, intraarterial, lymphatic, intravenous, subcutaneous, cerebrospinal, or combinations thereof.

32. A compound of the formula, [chemical structure] [chemical structure]
wherein Ph is phenyl and DMTr is 4,4′-dimethoxytrityl.

The application's sequence listing, which the Patent Office published only in electronic form, follows.

SEQUENCE LISTING (714 sequences)

SEQ ID NO: 1 - DNA, 20 bp, synthetic construct
  source 1..20: mol_type = other DNA
tttttttttttttttttttt

SEQ ID NO: 2 - DNA, 18 bp, synthetic construct
  source 1..18: mol_type = other DNA
tttttttttttttttttt

SEQ ID NO: 3 - protein, 16 aa, unidentified
  REGION 1..16: note = Description of Unknown: RFGF peptide
AAVALLPAVLLALLAP

SEQ ID NO: 4 - protein, 11 aa, unidentified
  REGION 1..11: note = Description of Unknown: RFGF analogue peptide
AALLPVLLAAP

SEQ ID NO: 5 - protein, 13 aa, Human immunodeficiency virus
GRKKRRQRRRPPQ

SEQ ID NO: 6 - protein, 16 aa, Drosophila sp.
RQIKIWFQNRRMKWKK

SEQ ID NO: 7 - DNA, 21 bp, synthetic construct
  source 1..21: mol_type = other DNA
  modified_base 1: mod_base = OTHER; note = 2'-deoxy-2'-fluorouridine-3'-phosphate
  modified_base 3: mod_base = OTHER; note = 2'-deoxy-2'-fluorouridine-3'-phosphate
  modified_base 5: mod_base = OTHER; note = 2'-deoxy-2'-fluorouridine-3'-phosphate
  modified_base 7: mod_base = OTHER; note = 2'-deoxy-2'-fluorouridine-3'-phosphate
  modified_base 9: mod_base = OTHER; note = 2'-deoxy-2'-fluorouridine-3'-phosphate
  modified_base 11: mod_base = OTHER; note = 2'-deoxy-2'-fluorouridine-3'-phosphate
  modified_base 13: mod_base = OTHER; note = 2'-deoxy-2'-fluorouridine-3'-phosphate
  modified_base 15: mod_base = OTHER; note = 2'-deoxy-2'-fluorouridine-3'-phosphate
  modified_base 17: mod_base = OTHER; note = 2'-deoxy-2'-fluorouridine-3'-phosphate
  modified_base 19: mod_base = OTHER; note = 2'-deoxy-2'-fluorouridine-3'-phosphate
  modified_base 21: mod_base = OTHER; note = 2'-O-methyluridine
  misc_feature 1: note = RNA
  misc_feature 3: note = RNA
  misc_feature 5: note = RNA
  misc_feature 7: note = RNA
  misc_feature 9: note = RNA
  misc_feature 11: note = RNA
  misc_feature 13: note = RNA
  misc_feature 15: note = RNA
  misc_feature 17: note = RNA
  misc_feature 19: note = RNA
  misc_feature 21: note = RNA
  misc_feature 2: note = DNA
  misc_feature 4: note = DNA
  misc_feature 6: note = DNA
  misc_feature 8: note = DNA
  misc_feature 10: note = DNA
  misc_feature 12: note = DNA
  misc_feature 14: note = DNA
  misc_feature 16: note = DNA
  misc_feature 18: note = DNA
  misc_feature 20: note = DNA
ttttttttttttttttttttt

SEQ ID NO: 8 - RNA, 23 nt, synthetic construct
  source 1..23: mol_type = other RNA
  modified_base 1: mod_base = OTHER; note = 2'-O-methyluridine-3'-phosphate 5'-(E)-Vinylphosphonate
  modified_base 2: mod_base = OTHER; note = 2'-deoxy-2'-fluorouridine-3'-phosphate
  modified_base 3: mod_base = OTHER; note = 2'-O-methyluridine-3'-phosphate
  modified_base 4: mod_base = OTHER; note = 2'-deoxy-2'-fluorocytidine-3'-phosphate
  modified_base 5: mod_base = OTHER; note = 2'-O-methylguanosine-3'-phosphate
  modified_base 6: mod_base = OTHER; note = 2'-deoxy-2'-fluoroadenosine-3'-phosphate
  modified_base 7: mod_base = OTHER; note = 2'-O-methyladenosine-3'-phosphate
  modified_base 8: mod_base = OTHER; note = 2'-deoxy-2'-fluorouridine-3'-phosphate
  modified_base 9: mod_base = OTHER; note = 2'-O-methylcytidine-3'-phosphate
  modified_base 10: mod_base = OTHER; note = 2'-deoxy-2'-fluoroadenosine-3'-phosphate
  modified_base 11: mod_base = OTHER; note = 2'-O-methyladenosine-3'-phosphate
  modified_base 12: mod_base = OTHER; note = 2'-O-methyluridine-3'-phosphate
  modified_base 13: mod_base = OTHER; note = 2'-O-methylcytidine-3'-phosphate
  modified_base 14: mod_base = OTHER; note = 2'-deoxy-2'-fluorocytidine-3'-phosphate
  modified_base 15: mod_base = OTHER; note = 2'-O-methyladenosine-3'-phosphate
  modified_base 16: mod_base = OTHER; note = 2'-deoxy-2'-fluoroadenosine-3'-phosphate
  modified_base 17: mod_base = OTHER; note = 2'-O-methylcytidine-3'-phosphate
  modified_base 18: mod_base = OTHER; note = 2'-deoxy-2'-fluoroadenosine-3'-phosphate
  modified_base 19: mod_base = OTHER; note = 2'-O-methylguanosine-3'-phosphate
  modified_base 20: mod_base = OTHER; note = 2'-deoxy-2'-fluorouridine-3'-phosphate
  modified_base 21: mod_base = OTHER; note = 2'-O-methyladenosine-3'-phosphate
  modified_base 22: mod_base = OTHER; note = 2'-O-methylguanosine-3'-phosphate
  modified_base 23: mod_base = OTHER; note = 2'-O-methyluridine
tttcgaatcaatccaacagtagt

SEQ ID NO: 9 - DNA, 19 bp, synthetic construct
  source 1..19: mol_type = other DNA
ttttttttttttttttttt

SEQ ID NO: 10 - RNA, 21 nt, synthetic construct
  source 1..21: mol_type = other RNA
  modified_base 1: mod_base = OTHER; note = 2'-O-methylguanosine-3'-phosphorothioate
  modified_base 2: mod_base = OTHER; note = 2'-O-methyladenosine-3'-phosphorothioate
  modified_base 3: mod_base = OTHER; note = 2'-O-methyladenosine-3'-phosphate
  modified_base 4: mod_base = OTHER; note = 2'-O-methyluridine-3'-phosphate
  modified_base 5: mod_base = OTHER; note = 2'-O-methylguanosine-3'-phosphate
  modified_base 6: mod_base = OTHER; note = 2'-O-methyluridine-3'-phosphate
  modified_base 7: mod_base = OTHER; note = 2'-deoxy-2'-fluoroguanosine-3'-phosphate
  modified_base 8: mod_base = OTHER; note = 2'-O-methyladenosine-3'-phosphate
  modified_base 9: mod_base = OTHER; note = 2'-O-methyladenosine-3'-phosphate
  modified_base 10: mod_base = OTHER; note = 2'-deoxy-2'-fluoroadenosine-3'-phosphate
  modified_base 11: mod_base = OTHER; note = 2'-deoxy-2'-fluoroguanosine-3'-phosphate
  modified_base 12: mod_base = OTHER; note = 2'-O-methyluridine-3'-phosphate
  modified_base 13: mod_base = OTHER; note = 2'-O-methylcytidine-3'-phosphate
  modified_base 14: mod_base = OTHER; note = 2'-O-methyladenosine-3'-phosphate
  modified_base 15: mod_base = OTHER; note = 2'-O-methyluridine-3'-phosphate
  modified_base 16: mod_base = OTHER; note = 2'-O-methylcytidine-3'-phosphate
  modified_base 17: mod_base = OTHER; note = 2'-O-methylguanosine-3'-phosphate
  modified_base 18: mod_base = OTHER; note = 2'-O-methyladenosine-3'-phosphate
  modified_base 19: mod_base = OTHER; note = 2'-O-methylcytidine-3'-phosphate
  modified_base 20: mod_base = OTHER; note = 2'-O-methyladenosine-3'-phosphate
  modified_base 21: mod_base = OTHER; note = 2'-O-methyladenosine-3'-phosphate conjugated at the 3'-end to a tri-N-acetylgalactosamine ligand
gaatgtgaaagtcatcgacaa

SEQ ID NO: 11 - RNA, 21 nt, synthetic construct
  source 1..21: mol_type = other RNA
  modified_base 1: mod_base = OTHER; note = 2'-O-methyladenosine-3'-phosphorothioate
  modified_base 2: mod_base = OTHER; note = 2'-O-methyladenosine-3'-phosphorothioate
  modified_base 3: mod_base = OTHER; note = 2'-O-methylcytidine-3'-phosphate
  modified_base 4: mod_base = OTHER; note = 2'-O-methyladenosine-3'-phosphate
  modified_base 5: mod_base = OTHER; note = 2'-O-methylguanosine-3'-phosphate
  modified_base 6: mod_base = OTHER; note = 2'-O-methyluridine-3'-phosphate
  modified_base 7: mod_base = OTHER; note = 2'-deoxy-2'-fluoroguanosine-3'-phosphate
  modified_base 8: mod_base = OTHER; note = 2'-O-methyluridine-3'-phosphate
  modified_base 9: mod_base = OTHER; note = 2'-deoxy-2'-fluorouridine-3'-phosphate
  modified_base 10: mod_base = OTHER; note = 2'-deoxy-2'-fluorocytidine-3'-phosphate
  modified_base 11: mod_base = OTHER; note = 2'-deoxy-2'-fluorouridine-3'-phosphate
  modified_base 12: mod_base = OTHER; note = 2'-O-methyluridine-3'-phosphate
  modified_base 13: mod_base = OTHER; note = 2'-O-methylguanosine-3'-phosphate
  modified_base 14: mod_base = OTHER; note = 2'-O-methylcytidine-3'-phosphate
  modified_base 15: mod_base = OTHER; note = 2'-O-methyluridine-3'-phosphate
  modified_base 16: mod_base = OTHER; note = 2'-O-methylcytidine-3'-phosphate
  modified_base 17: mod_base = OTHER; note = 2'-O-methyluridine-3'-phosphate
  modified_base 18: mod_base = OTHER; note = 2'-O-methyladenosine-3'-phosphate
  modified_base 19: mod_base = OTHER; note = 2'-O-methyluridine-3'-phosphate
  modified_base 20: mod_base = OTHER; note = 2'-O-methyladenosine-3'-phosphate
  modified_base 21: mod_base = OTHER; note = 2'-O-methyladenosine-3'-phosphate conjugated at the 3'-end to a tri-N-acetylgalactosamine ligand
aacagtgttcttgctctataa

SEQ ID NO: 12 - RNA, 21 nt, synthetic construct
  source 1..21: mol_type = other RNA
  modified_base 1: mod_base = OTHER; note = 2'-O-methyladenosine-3'-phosphorothioate
  modified_base 2: mod_base = OTHER; note = 2'-O-methylguanosine-3'-phosphorothioate
  modified_base 3: mod_base = OTHER; note = 2'-O-methyluridine-3'-phosphate
  modified_base 4: mod_base = OTHER; note = 2'-O-methylguanosine-3'-phosphate
  modified_base 5: mod_base = OTHER; note = 2'-O-methyluridine-3'-phosphate
  modified_base 6: mod_base = OTHER; note = 2'-O-methyluridine-3'-phosphate
  modified_base 7: mod_base = OTHER; note = 2'-deoxy-2'-fluorocytidine-3'-phosphate
  modified_base 8: mod_base = OTHER; note = 2'-O-methyluridine-3'-phosphate
  modified_base 9: mod_base = OTHER; note = 2'-deoxy-2'-fluorouridine-3'-phosphate
  modified_base 10: mod_base = OTHER; note = 2'-deoxy-2'-fluoroguanosine-3'-phosphate
  modified_base 11: mod_base = OTHER; note = 2'-deoxy-2'-fluorocytidine-3'-phosphate
  modified_base 12: mod_base = OTHER; note = 2'-O-methyluridine-3'-phosphate
  modified_base 13: mod_base = OTHER; note = 2'-O-methylcytidine-3'-phosphate
  modified_base 14: mod_base = OTHER; note = 2'-O-methyluridine-3'-phosphate
  modified_base 15: mod_base = OTHER; note = 2'-O-methyladenosine-3'-phosphate
  modified_base 16: mod_base = OTHER; note = 2'-O-methyluridine-3'-phosphate
  modified_base 17: mod_base = OTHER; note = 2'-O-methyladenosine-3'-phosphate
  modified_base 18: mod_base = OTHER; note = 2'-O-methyladenosine-3'-phosphate
  modified_base 19: mod_base = OTHER; note = 2'-O-methyladenosine-3'-phosphate
  modified_base 20: mod_base = OTHER; note = 2'-O-methylcytidine-3'-phosphate
  modified_base 21: mod_base = OTHER; note = 2'-O-methyladenosine-3'-phosphate conjugated at the 3'-end to a tri-N-acetylgalactosamine ligand
agtgttcttgctctataaaca

SEQ ID NO: 13 - RNA, 21 nt, synthetic construct
  source 1..21: mol_type = other RNA
  modified_base 1: mod_base = OTHER; note = 2'-O-methyluridine-3'-phosphorothioate
  modified_base 2: mod_base = OTHER; note = 2'-O-methyluridine-3'-phosphorothioate
  modified_base 3: mod_base = OTHER; note = 2'-O-methylcytidine-3'-phosphate
  modified_base 4: mod_base = OTHER; note = 2'-O-methyluridine-3'-phosphate
  modified_base 5: mod_base = OTHER; note = 2'-O-methyluridine-3'-phosphate
  modified_base 6: mod_base = OTHER; note = 2'-O-methylguanosine-3'-phosphate
  modified_base 7: mod_base = OTHER; note = 2'-deoxy-2'-fluorocytidine-3'-phosphate
  modified_base 8: mod_base = OTHER; note = 2'-O-methyluridine-3'-phosphate
  modified_base 9: mod_base = OTHER; note = 2'-deoxy-2'-fluorocytidine-3'-phosphate
  modified_base 10: mod_base = OTHER; note = 2'-deoxy-2'-fluorouridine-3'-phosphate
  modified_base 11: mod_base = OTHER; note = 2'-deoxy-2'-fluoroadenosine-3'-phosphate
  modified_base 12: mod_base = OTHER; note = 2'-O-methyluridine-3'-phosphate
  modified_base 13: mod_base = OTHER; note = 2'-O-methyladenosine-3'-phosphate
  modified_base 14: mod_base = OTHER; note = 2'-O-methyladenosine-3'-phosphate
  modified_base 15: mod_base = OTHER; note = 2'-O-methyladenosine-3'-phosphate
  modified_base 16: mod_base = OTHER; note = 2'-O-methylcytidine-3'-phosphate
  modified_base 17: mod_base = OTHER; note = 2'-O-methylcytidine-3'-phosphate
  modified_base 18: mod_base = OTHER; note = 2'-O-methylguanosine-3'-phosphate
  modified_base 19: mod_base = OTHER; note = 2'-O-methyluridine-3'-phosphate
  modified_base 20: mod_base = OTHER; note = 2'-O-methylguanosine-3'-phosphate
  modified_base 21: mod_base = OTHER; note = 2'-O-methyluridine-3'-phosphate conjugated at the 3'-end to a tri-N-acetylgalactosamine ligand
ttcttgctctataaaccgtgt

SEQ ID NO: 14 - RNA, 23 nt, synthetic construct
  source 1..23: mol_type = other RNA
  modified_base 1: mod_base = OTHER; note = 2'-O-methyluridine-3'-phosphorothioate
  modified_base 2: mod_base = OTHER; note = 2'-deoxy-2'-fluorouridine-3'-phosphorothioate
  modified_base 3: mod_base = OTHER; note = 2'-O-methylguanosine-3'-phosphate
  modified_base 4: mod_base = OTHER; note = 2'-O-methyluridine-3'-phosphate
  modified_base 5: mod_base = OTHER; note = 2'-O-methylcytidine-3'-phosphate
  modified_base 6: mod_base = OTHER; note = 2'-deoxy-2'-fluoroguanosine-3'-phosphate
  modified_base 7: mod_base = OTHER; note = 2'-O-methyladenosine-3'-phosphate
  modified_base 8: mod_base = OTHER; note = 2'-deoxy-2'-fluorouridine-3'-phosphate
  modified_base 9: mod_base = OTHER; note = 2'-deoxy-2'-fluoroguanosine-3'-phosphate
  modified_base 10: mod_base = OTHER; note = 2'-O-methyladenosine-3'-phosphate
  modified_base 11: mod_base = OTHER; note = 2'-O-methylcytidine-3'-phosphate
  modified_base 12: mod_base = OTHER; note = 2'-O-methyluridine-3'-phosphate
  modified_base 13: mod_base = OTHER; note = 2'-O-methyluridine-3'-phosphate
  modified_base 14: mod_base = OTHER; note = 2'-deoxy-2'-fluorouridine-3'-phosphate
  modified_base 15: mod_base = OTHER; note = 2'-O-methylcytidine-3'-phosphate
  modified_base 16: mod_base = OTHER; note = 2'-deoxy-2'-fluoroadenosine-3'-phosphate
  modified_base 17: mod_base = OTHER; note = 2'-O-methylcytidine-3'-phosphate
  modified_base 18: mod_base = OTHER; note = 2'-O-methyladenosine-3'-phosphate
  modified_base 19: mod_base = OTHER; note = 2'-O-methyluridine-3'-phosphate
  modified_base 20: mod_base = OTHER; note = 2'-O-methyluridine-3'-phosphate
  modified_base 21: mod_base = OTHER; note = 2'-O-methylcytidine-3'-phosphorothioate
  modified_base 22: mod_base = OTHER; note = 2'-O-methyluridine-3'-phosphorothioate
  modified_base 23: mod_base = OTHER; note = 2'-O-methylguanosine
ttgtcgatgactttcacattctg

SEQ ID NO: 15 - RNA, 23 nt, synthetic construct
  source 1..23: mol_type = other RNA
  modified_base 1: mod_base = OTHER; note = 2'-O-methyluridine-3'-phosphorothioate
  modified_base 2: mod_base = OTHER; note = 2'-deoxy-2'-fluorouridine-3'-phosphorothioate
  modified_base 3: mod_base = OTHER; note = 2'-O-methyladenosine-3'-phosphate
  modified_base 4: mod_base = OTHER; note = 2'-O-methyluridine-3'-phosphate
  modified_base 5: mod_base = OTHER; note = 2'-O-methyladenosine-3'-phosphate
  modified_base 6: mod_base = OTHER; note = 2'-deoxy-2'-fluoroguanosine-3'-phosphate
  modified_base 7: mod_base = OTHER; note = 2'-O-methyladenosine-3'-phosphate
  modified_base 8: mod_base = OTHER; note = 2'-O-methylguanosine-3'-phosphate
  modified_base 9: mod_base = OTHER; note = 2'-O-methylcytidine-3'-phosphate
  modified_base 10: mod_base = OTHER; note = 2'-O-methyladenosine-3'-phosphate
  modified_base 11: mod_base = OTHER; note = 2'-O-methyladenosine-3'-phosphate
  modified_base 12: mod_base = OTHER; note = 2'-O-methylguanosine-3'-phosphate
  modified_base 13: mod_base = OTHER; note = 2'-O-methyladenosine-3'-phosphate
  modified_base 14: mod_base = OTHER; note = 2'-deoxy-2'-fluoroadenosine-3'-phosphate
  modified_base 15: mod_base = OTHER; note = 2'-O-methylcytidine-3'-phosphate
  modified_base 16: mod_base = OTHER; note = 2'-deoxy-2'-fluoroadenosine-3'-phosphate
  modified_base 17: mod_base = OTHER; note = 2'-O-methylcytidine-3'-phosphate
  modified_base 18: mod_base = OTHER; note = 2'-O-methyluridine-3'-phosphate
  modified_base 19: mod_base = OTHER; note = 2'-O-methylguanosine-3'-phosphate
  modified_base 20: mod_base = OTHER; note = 2'-O-methyluridine-3'-phosphate
  modified_base 21: mod_base = OTHER; note = 2'-O-methyluridine-3'-phosphorothioate
  modified_base 22: mod_base = OTHER; note = 2'-O-methyluridine-3'-phosphorothioate
  modified_base 23: mod_base = OTHER; note = 2'-O-methyluridine
ttatagagcaagaacactgtttt

SEQ ID NO: 16 - RNA, 23 nt, synthetic construct
  source 1..23: mol_type = other RNA
  modified_base 1: mod_base = OTHER; note = 2'-O-methyluridine-3'-phosphorothioate
  modified_base 2: mod_base = OTHER; note = 2'-deoxy-2'-fluoroguanosine-3'-phosphorothioate
  modified_base 3: mod_base = OTHER; note = 2'-O-methyluridine-3'-phosphate
  modified_base 4: mod_base = OTHER; note = 2'-O-methyluridine-3'-phosphate
  modified_base 5: mod_base = OTHER; note = 2'-O-methyluridine-3'-phosphate
  modified_base 6: mod_base = OTHER; note = 2'-O-methyladenosine-3'-phosphate
  modified_base 7: mod_base = OTHER; note = 2'-O-methyluridine-3'-phosphate
  modified_base 8: mod_base = OTHER; note = 2'-O-methyladenosine-3'-phosphate
  modified_base 9: mod_base = OTHER; note = 2'-O-methylguanosine-3'-phosphate
  modified_base 10: mod_base = OTHER; note = 2'-O-methyladenosine-3'-phosphate
  modified_base 11: mod_base = OTHER; note = 2'-O-methylguanosine-3'-phosphate
  modified_base 12: mod_base = OTHER; note = 2'-O-methylcytidine-3'-phosphate
  modified_base 13: mod_base = OTHER; note = 2'-O-methyladenosine-3'-phosphate
  modified_base 14: mod_base = OTHER; note = 2'-deoxy-2'-fluoroadenosine-3'-phosphate
  modified_base 15: mod_base = OTHER; note = 2'-O-methylguanosine-3'-phosphate
  modified_base 16: mod_base = OTHER; note = 2'-deoxy-2'-fluoroadenosine-3'-phosphate
  modified_base 17: mod_base = OTHER; note = 2'-O-methyladenosine-3'-phosphate
  modified_base 18: mod_base = OTHER; note = 2'-O-methylcytidine-3'-phosphate
  modified_base 19: mod_base = OTHER; note = 2'-O-methyladenosine-3'-phosphate
  modified_base 20: mod_base = OTHER; note = 2'-O-methylcytidine-3'-phosphate
  modified_base 21: mod_base = OTHER; note = 2'-O-methyluridine-3'-phosphorothioate
  modified_base 22: mod_base = OTHER; note = 2'-O-methylguanosine-3'-phosphorothioate
  modified_base 23: mod_base = OTHER; note = 2'-O-methyluridine
tgtttatagagcaagaacactgt

SEQ ID NO: 17 - RNA, 23 nt, synthetic construct
  source 1..23: mol_type = other RNA
  modified_base 1: mod_base = OTHER; note = 2'-O-methyladenosine-3'-phosphorothioate
  modified_base 2: mod_base = OTHER; note = 2'-deoxy-2'-fluorocytidine-3'-phosphorothioate
  modified_base 3: mod_base = OTHER; note = 2'-O-methyladenosine-3'-phosphate
  modified_base 4: mod_base = OTHER; note = 2'-O-methylcytidine-3'-phosphate
  modified_base 5: mod_base = OTHER; note = 2'-O-methylguanosine-3'-phosphate
  modified_base 6: mod_base = OTHER; note = 2'-O-methylguanosine-3'-phosphate
  modified_base 7: mod_base = OTHER; note = 2'-O-methyluridine-3'-phosphate
  modified_base 8: mod_base = OTHER; note = 2'-O-methyluridine-3'-phosphate
  modified_base 9: mod_base = OTHER; note = 2'-O-methyluridine-3'-phosphate
  modified_base 10: mod_base = OTHER; note = 2'-O-methyladenosine-3'-phosphate
  modified_base 11: mod_base = OTHER; note = 2'-O-methyluridine-3'-phosphate
  modified_base 12: mod_base = OTHER; note = 2'-O-methyladenosine-3'-phosphate
  modified_base 13: mod_base = OTHER; note = 2'-O-methylguanosine-3'-phosphate
  modified_base 14: mod_base = OTHER; note = 2'-deoxy-2'-fluoroadenosine-3'-phosphate
  modified_base 15: mod_base = OTHER; note = 2'-O-methylguanosine-3'-phosphate
  modified_base 16: mod_base = OTHER; note = 2'-deoxy-2'-fluorocytidine-3'-phosphate
  modified_base 17: mod_base = OTHER; note = 2'-O-methyladenosine-3'-phosphate
  modified_base 18: mod_base = OTHER; note = 2'-O-methyladenosine-3'-phosphate
  modified_base 19: mod_base = OTHER; note = 2'-O-methylguanosine-3'-phosphate
  modified_base 20: mod_base = OTHER; note = 2'-O-methyladenosine-3'-phosphate
  modified_base 21: mod_base = OTHER; note = 2'-O-methyladenosine-3'-phosphorothioate
  modified_base 22: mod_base = OTHER; note = 2'-O-methylcytidine-3'-phosphorothioate
  modified_base 23: mod_base = OTHER; note = 2'-O-methyladenosine
acacggtttatagagcaagaaca

SEQ ID NO: 18 - RNA, 21 nt, synthetic construct
  source 1..21: mol_type = other RNA
  modified_base 1: mod_base = OTHER; note = 2'-O-methyladenosine-3'-phosphorothioate
  modified_base 2: mod_base = OTHER; note = 2'-O-methylguanosine-3'-phosphorothioate
  modified_base 3: mod_base = OTHER; note = 2'-O-methylguanosine-3'-phosphate
  modified_base 4: mod_base = OTHER; note = 2'-O-methyladenosine-3'-phosphate
  modified_base 5: mod_base = OTHER; note = 2'-O-methyluridine-3'-phosphate
  modified_base 6: mod_base = OTHER; note = 2'-O-methylcytidine-3'-phosphate
  modified_base 7: mod_base = OTHER; note = 2'-deoxy-2'-fluorouridine-3'-phosphate
  modified_base 8: mod_base = OTHER; note = 2'-O-methyluridine-3'-phosphate
  modified_base 9: mod_base = OTHER; note = 2'-deoxy-2'-fluoroguanosine-3'-phosphate
  modified_base 10: mod_base = OTHER; note = 2'-deoxy-2'-fluorocytidine-3'-phosphate
  modified_base 11: mod_base = OTHER; note = 2'-deoxy-2'-fluorocytidine-3'-phosphate
  modified_base 12: mod_base = OTHER; note = 2'-O-methyladenosine-3'-phosphate
  modified_base 13: mod_base = OTHER; note = 2'-O-methyladenosine-3'-phosphate
  modified_base 14: mod_base = OTHER; note = 2'-O-methyladenosine-3'-phosphate
  modified_base 15: mod_base = OTHER; note = 2'-O-methylguanosine-3'-phosphate
  modified_base 16: mod_base = OTHER; note = 2'-O-methylcytidine-3'-phosphate
  modified_base 17: mod_base = OTHER; note = 2'-O-methyladenosine-3'-phosphate
  modified_base 18: mod_base = OTHER; note = 2'-O-methylguanosine-3'-phosphate
  modified_base 19: mod_base = OTHER; note = 2'-O-methyluridine-3'-phosphate
  modified_base 20: mod_base = OTHER; note = 2'-O-methyladenosine-3'-phosphate
  modified_base 21: mod_base = OTHER; note = 2'-O-methyladenosine-3'-phosphate conjugated at the 3'-end to a tri-N-acetylgalactosamine ligand
aggatcttgccaaagcagtaa

SEQ ID NO: 19 - RNA, 23 nt, synthetic construct
  source 1..23: mol_type = other RNA
  modified_base 1: mod_base = OTHER; note = 2'-O-methyluridine-3'-phosphorothioate
  modified_base 2: mod_base = OTHER; note = 2'-deoxy-2'-fluorouridine-3'-phosphorothioate
  modified_base 3: mod_base = OTHER; note = 2'-O-methyladenosine-3'-phosphate
  modified_base 4: mod_base = OTHER; note = 2'-O-methylcytidine-3'-phosphate
  modified_base 5: mod_base = OTHER; note = 2'-O-methyluridine-3'-phosphate
  modified_base 6: mod_base = OTHER; note = Guanosine or isoguanosine-glycol nucleic acid (GNA), S-isomer
  modified_base 7: mod_base = OTHER; note = 2'-O-methylcytidine-3'-phosphate
  modified_base 8: mod_base = OTHER; note = 2'-O-methyluridine-3'-phosphate
  modified_base 9: mod_base = OTHER; note = 2'-O-methyluridine-3'-phosphate
  modified_base 10: mod_base = OTHER; note = 2'-O-methyluridine-3'-phosphate
  modified_base 11: mod_base = OTHER; note = 2'-O-methylguanosine-3'-phosphate
  modified_base 12: mod_base = OTHER; note = 2'-O-methylguanosine-3'-phosphate
  modified_base 13: mod_base = OTHER; note = 2'-O-methylcytidine-3'-phosphate
  modified_base 14: mod_base = OTHER; note = 2'-deoxy-2'-fluoroadenosine-3'-phosphate
  modified_base 15: mod_base = OTHER; note = 2'-O-methyladenosine-3'-phosphate
  modified_base 16: mod_base = OTHER; note = 2'-deoxy-2'-fluoroguanosine-3'-phosphate
  modified_base 17: mod_base = OTHER; note = 2'-O-methyladenosine-3'-phosphate
  modified_base 18: mod_base = OTHER; note = 2'-O-methyluridine-3'-phosphate
  modified_base 19: mod_base = OTHER; note = 2'-O-methylcytidine-3'-phosphate
  modified_base 20: mod_base = OTHER; note = 2'-O-methylcytidine-3'-phosphate
  modified_base 21: mod_base = OTHER; note = 2'-O-methyluridine-3'-phosphorothioate
  modified_base 22: mod_base = OTHER; note = 2'-O-methylguanosine-3'-phosphorothioate
  modified_base 23: mod_base = OTHER; note = 2'-O-methylguanosine
ttactgctttggcaagatcctgg

SEQ ID NO: 20 - RNA, 21 nt, synthetic construct
  source 1..21: mol_type = other RNA
  modified_base 1: mod_base = OTHER; note = 2'-O-methyladenosine-3'-phosphorothioate
  modified_base 2: mod_base = OTHER; note = 2'-O-methylguanosine-3'-phosphorothioate
  modified_base 3: mod_base = OTHER; note = 2'-O-methylguanosine-3'-phosphate
  modified_base 4: mod_base = OTHER; note = 2'-O-methyladenosine-3'-phosphate
  modified_base 5: mod_base = OTHER; note = 2'-O-methyluridine-3'-phosphate
  modified_base 6: mod_base = OTHER; note = 2'-O-methylcytidine-3'-phosphate
  modified_base 7: mod_base = OTHER; note = 2'-deoxy-2'-fluorouridine-3'-phosphate
  modified_base 8: mod_base = OTHER; note = 2'-O-methyluridine-3'-phosphate
  modified_base 9: mod_base = OTHER; note = 2'-deoxy-2'-fluoroguanosine-3'-phosphate
  modified_base 10: mod_base = OTHER; note = 2'-deoxy-2'-fluorocytidine-3'-phosphate
  modified_base 11: mod_base = OTHER; note = 2'-deoxy-2'-fluorocytidine-3'-phosphate
  modified_base 12: mod_base = OTHER; note = 2'-O-methyladenosine-3'-phosphate
  modified_base 13: mod_base = OTHER; note = 2'-O-methyladenosine-3'-phosphate
  modified_base 14: mod_base = OTHER; note = 2'-O-methyladenosine-3'-phosphate
  modified_base 15: mod_base = OTHER; note = 2'-O-methylguanosine-3'-phosphate
  modified_base 16: mod_base = OTHER; note = 2'-O-methylcytidine-3'-phosphate
  modified_base 17: mod_base = OTHER; note = 2'-O-methyladenosine-3'-phosphate
  modified_base 18: mod_base = OTHER; note = 2'-O-methylguanosine-3'-phosphate
  modified_base 19: mod_base = OTHER; note = 2'-O-methyluridine-3'-phosphate
  modified_base 20: mod_base = OTHER; note = 2'-O-methyladenosine-3'-phosphate
  modified_base 21: mod_base = OTHER; note = 2'-O-methyladenosine-3'-phosphate conjugated at the 3'-end to a tri-N-acetylgalactosamine ligand
aggatcttgccaaagcagtaa

SEQ ID NO: 21 - RNA, 23 nt, synthetic construct
  source 1..23: mol_type = other RNA
  modified_base 1: mod_base = OTHER; note = 2'-O-methyluridine-3'-phosphorothioate
  modified_base 2: mod_base = OTHER; note = 2'-deoxy-2'-fluorouridine-3'-phosphorothioate
  modified_base 3: mod_base = OTHER; note = 2'-O-methyladenosine-3'-phosphate
  modified_base 4: mod_base = OTHER; note = 2'-O-methylcytidine-3'-phosphate
  modified_base 5: mod_base = OTHER; note = 2'-O-methyluridine-3'-phosphate
  modified_base 6: mod_base = OTHER; note = 2'-O-methylguanosine-3'-phosphate
  modified_base 7: mod_base = OTHER; note = Cytidine or isocytidine-glycol nucleic acid (GNA), S-isomer
  modified_base 8: mod_base = OTHER; note = 2'-O-methyluridine-3'-phosphate
  modified_base 9: mod_base = OTHER; note = 2'-O-methyluridine-3'-phosphate
  modified_base 10: mod_base = OTHER; note = 2'-O-methyluridine-3'-phosphate
  modified_base 11: mod_base = OTHER; note = 2'-O-methylguanosine-3'-phosphate
  modified_base 12: mod_base = OTHER; note = 2'-O-methylguanosine-3'-phosphate
  modified_base 13: mod_base = OTHER; note = 2'-O-methylcytidine-3'-phosphate
  modified_base 14: mod_base = OTHER; note = 2'-deoxy-2'-fluoroadenosine-3'-phosphate
  modified_base 15: mod_base = OTHER; note = 2'-O-methyladenosine-3'-phosphate
  modified_base 16: mod_base = OTHER; note = 2'-deoxy-2'-fluoroguanosine-3'-phosphate
  modified_base 17: mod_base = OTHER; note = 2'-O-methyladenosine-3'-phosphate
  modified_base 18: mod_base = OTHER; note = 2'-O-methyluridine-3'-phosphate
  modified_base 19: mod_base = OTHER; note = 2'-O-methylcytidine-3'-phosphate
  modified_base 20: mod_base = OTHER; note = 2'-O-methylcytidine-3'-phosphate
  modified_base 21: mod_base = OTHER; note = 2'-O-methyluridine-3'-phosphorothioate
  modified_base 22: mod_base = OTHER; note = 2'-O-methylguanosine-3'-phosphorothioate
  modified_base 23: mod_base = OTHER; note = 2'-O-methylguanosine
ttactgctttggcaagatcctgg

SEQ ID NO: 22 - RNA, 21 nt, synthetic construct
  source 1..21: mol_type = other RNA
  modified_base 1: mod_base = OTHER; note = 2'-O-methylguanosine-3'-phosphorothioate
  modified_base 2: mod_base = OTHER; note = 2'-O-methyladenosine-3'-phosphorothioate
  modified_base 3: mod_base = OTHER; note = 2'-O-methylcytidine-3'-phosphate
  modified_base 4: mod_base = OTHER; note = 2'-O-methylcytidine-3'-phosphate
  modified_base 5: mod_base = OTHER; note = 2'-O-methyladenosine-3'-phosphate
  modified_base 6: mod_base = OTHER; note = 2'-O-methylguanosine-3'-phosphate
  modified_base 7: mod_base = OTHER; note = 2'-deoxy-2'-fluoroguanosine-3'-phosphate
  modified_base 8: mod_base = OTHER; note = 2'-O-methyladenosine-3'-phosphate
  modified_base 9: mod_base = OTHER; note = 2'-deoxy-2'-fluorouridine-3'-phosphate
  modified_base 10: mod_base = OTHER; note = 2'-deoxy-2'-fluorocytidine-3'-phosphate
  modified_base 11: mod_base = OTHER; note = 2'-deoxy-2'-fluorouridine-3'-phosphate
  modified_base 12: mod_base = OTHER; note = 2'-O-methyluridine-3'-phosphate
  modified_base 13: mod_base = OTHER; note = 2'-O-methylguanosine-3'-phosphate
  modified_base 14: mod_base = OTHER; note = 2'-O-methylcytidine-3'-phosphate
  modified_base 15: mod_base = OTHER; note = 2'-O-methylcytidine-3'-phosphate
  modified_base 16: mod_base = OTHER; note = 2'-O-methyladenosine-3'-phosphate
  modified_base 17: mod_base = OTHER; note = 2'-O-methyladenosine-3'-phosphate
  modified_base 18: mod_base = OTHER; note = 2'-O-methyladenosine-3'-phosphate
  modified_base 19: mod_base = OTHER; note = 2'-O-methylguanosine-3'-phosphate
  modified_base 20: mod_base = OTHER; note = 2'-O-methylcytidine-3'-phosphate
  modified_base 21: mod_base = OTHER; note = 2'-O-methyladenosine-3'-phosphate conjugated at the 3'-end to a tri-N-acetylgalactosamine ligand
gaccaggatcttgccaaagca

SEQ ID NO: 23 - RNA, 23 nt, synthetic construct
  source 1..23: mol_type = other RNA
  modified_base 1: mod_base = OTHER; note = 2'-O-methyluridine-3'-phosphorothioate
  modified_base 2: mod_base = OTHER; note = 2'-deoxy-2'-fluoroguanosine-3'-phosphorothioate
  modified_base 3: mod_base = OTHER; note = 2'-O-methylcytidine-3'-phosphate
  modified_base 4: mod_base = OTHER; note = 2'-O-methyluridine-3'-phosphate
  modified_base 5: mod_base = OTHER; note = 2'-O-methyluridine-3'-phosphate
  modified_base 6: mod_base = OTHER; note = 2'-O-methyluridine-3'-phosphate
  modified_base 7: mod_base = OTHER; note = Guanosine or isoguanosine-glycol nucleic acid (GNA), S-isomer
  modified_base 8: mod_base = OTHER; note = 2'-O-methylguanosine-3'-phosphate
  modified_base 9: mod_base = OTHER; note = 2'-O-methylcytidine-3'-phosphate
  modified_base 10: mod_base = OTHER; note = 2'-O-methyladenosine-3'-phosphate
  modified_base 11: mod_base = OTHER; note = 2'-O-methyladenosine-3'-phosphate
  modified_base 12: mod_base = OTHER; note = 2'-O-methylguanosine-3'-phosphate
  modified_base 13: mod_base = OTHER; note = 2'-O-methyladenosine-3'-phosphate
  modified_base 14: mod_base = OTHER; note = 2'-deoxy-2'-fluorouridine-3'-phosphate
  modified_base 15: mod_base = OTHER; note = 2'-O-methylcytidine-3'-phosphate
  modified_base 16: mod_base = OTHER; note = 2'-deoxy-2'-fluorocytidine-3'-phosphate
  modified_base 17: mod_base = OTHER; note = 2'-O-methyluridine-3'-phosphate
  modified_base 18: mod_base = OTHER; note = 2'-O-methylguanosine-3'-phosphate
  modified_base 19: mod_base = OTHER; note = 2'-O-methylguanosine-3'-phosphate
  modified_base 20: mod_base = OTHER; note = 2'-O-methyluridine-3'-phosphate
  modified_base 21: mod_base = OTHER; note = 2'-O-methylcytidine-3'-phosphorothioate
  modified_base 22: mod_base = OTHER; note = 2'-O-methylcytidine-3'-phosphorothioate
  modified_base 23: mod_base = OTHER; note = 2'-O-methyluridine
tgctttggcaagatcctggtcct

SEQ ID NO: 24 - RNA, 21 nt, synthetic construct
  source 1..21: mol_type = other RNA
  modified_base 1: mod_base = OTHER; note = 2'-O-methyluridine-3'-phosphorothioate
  modified_base 2: mod_base = OTHER; note = 2'-O-methylguanosine-3'-phosphorothioate
  modified_base 3: mod_base = OTHER; note = 2'-O-methylcytidine-3'-phosphate
  modified_base 4: mod_base = OTHER; note = 2'-O-methyluridine-3'-phosphate
  modified_base 5: mod_base = OTHER; note = 2'-O-methyluridine-3'-phosphate
  modified_base 6: mod_base = OTHER; note = 2'-O-methyluridine-3'-phosphate
  modified_base 7: mod_base = OTHER; note = 2'-deoxy-2'-fluoroguanosine-3'-phosphate
  modified_base 8: mod_base = OTHER; note = 2'-O-methyladenosine-3'-phosphate
  modified_base 9: mod_base = OTHER; note = 2'-deoxy-2'-fluoroguanosine-3'-phosphate
  modified_base 10: mod_base = OTHER; note = 2'-deoxy-2'-fluorocytidine-3'-phosphate
  modified_base 11: mod_base = OTHER; note = 2'-deoxy-2'-fluorocytidine-3'-phosphate
  modified_base 12: mod_base = OTHER; note = 2'-O-methyluridine-3'-phosphate
  modified_base 13: mod_base = OTHER; note = 2'-O-methylcytidine-3'-phosphate
  modified_base 14: mod_base = OTHER; note = 2'-O-methyladenosine-3'-phosphate
  modified_base 15: mod_base = OTHER; note = 2'-O-methylguanosine-3'-phosphate
  modified_base 16: mod_base = OTHER; note = 2'-O-methylcytidine-3'-phosphate
  modified_base 17: mod_base = OTHER; note = 2'-O-methyluridine-3'-phosphate
  modified_base 18: mod_base = OTHER; note = 2'-O-methyluridine-3'-phosphate
  modified_base 19: mod_base = OTHER; note = 2'-O-methylcytidine-3'-phosphate
  modified_base 20: mod_base = OTHER; note = 2'-O-methyluridine-3'-phosphate
  modified_base 21: mod_base = OTHER; note = 2'-O-methyladenosine-3'-phosphate conjugated at the 3'-end to a tri-N-acetylgalactosamine ligand
tgctttgagcctcagcttcta

SEQ ID NO: 25 - RNA, 23 nt, synthetic construct
  source 1..23: mol_type = other RNA
  modified_base 1: mod_base = OTHER; note = 2'-O-methyluridine-3'-phosphorothioate
  modified_base 2: mod_base = OTHER; note = 2'-deoxy-2'-fluoroadenosine-3'-phosphorothioate
  modified_base 3: mod_base = OTHER; note = 2'-O-methylguanosine-3'-phosphate
  modified_base 4: mod_base = OTHER; note = 2'-O-methyladenosine-3'-phosphate
  modified_base 5: mod_base = OTHER; note = 2'-O-methyladenosine-3'-phosphate
  modified_base 6: mod_base = OTHER; note = 2'-O-methylguanosine-3'-phosphate
  modified_base 7: mod_base = OTHER; note = Cytidine or isocytidine-glycol nucleic acid (GNA), S-isomer
  modified_base 8: mod_base = OTHER; note = 2'-O-methyluridine-3'-phosphate
  modified_base 9: mod_base = OTHER; note = 2'-O-methylguanosine-3'-phosphate
  modified_base 10: mod_base = OTHER; note = 2'-O-methyladenosine-3'-phosphate
  modified_base 11: mod_base = OTHER; note = 2'-O-methylguanosine-3'-phosphate
  modified_base 12: mod_base = OTHER; note = 2'-O-methylguanosine-3'-phosphate
  modified_base 13: mod_base = OTHER; note = 2'-O-methylcytidine-3'-phosphate
  modified_base 14: mod_base = OTHER; note = 2'-deoxy-2'-fluorouridine-3'-phosphate
  modified_base 15: mod_base = OTHER; note = 2'-O-methylcytidine-3'-phosphate
  modified_base 16: mod_base = OTHER; note = 2'-deoxy-2'-fluoroadenosine-3'-phosphate
  modified_base 17: mod_base = OTHER; note = 2'-O-methyladenosine-3'-phosphate
  modified_base 18: mod_base = OTHER; note = 2'-O-methyladenosine-3'-phosphate
  modified_base 19: mod_base = OTHER; note = 2'-O-methylguanosine-3'-phosphate
  modified_base 20: mod_base = OTHER; note = 2'-O-methylcytidine-3'-phosphate
  modified_base 21: mod_base = OTHER; note = 2'-O-methyladenosine-3'-phosphorothioate
  modified_base 22: mod_base = OTHER; note = 2'-O-methylcytidine-3'-phosphorothioate
  modified_base 23: mod_base = OTHER; note = 2'-O-methyluridine
tagaagctgaggctcaaagcact

SEQ ID NO: 26 - RNA, 21 nt, synthetic construct
  source 1..21: mol_type = other RNA
  modified_base 1: mod_base = OTHER; note = 2'-O-methylguanosine-3'-phosphorothioate
  modified_base 2: mod_base = OTHER; note = 2'-O-methylguanosine-3'-phosphorothioate
  modified_base 3: mod_base = OTHER; note = 2'-O-methyladenosine-3'-phosphate
  modified_base 4: mod_base = OTHER; note = 2'-O-methylguanosine-3'-phosphate
  modified_base 5: mod_base = OTHER; note = 2'-O-methylcytidine-3'-phosphate
  modified_base 6: mod_base = OTHER; note = 2'-O-methylcytidine-3'-phosphate
  modified_base 7: mod_base = OTHER; note = 2'-deoxy-2'-fluorocytidine-3'-phosphate
  modified_base 8: mod_base = OTHER; note = 2'-O-methyladenosine-3'-phosphate
  modified_base 9: mod_base = OTHER; note = 2'-deoxy-2'-fluoroadenosine-3'-phosphate
  modified_base 10: mod_base = OTHER; note = 2'-deoxy-2'-fluoroguanosine-3'-phosphate
  modified_base 11: mod_base = OTHER; note = 2'-deoxy-2'-fluoroadenosine-3'-phosphate
  modified_base 12: mod_base = OTHER; note = 2'-O-methyladenosine-3'-phosphate
  modified_base 13: mod_base = OTHER; note = 2'-O-methyladenosine-3'-phosphate
  modified_base 14: mod_base = OTHER; note = 2'-O-methylguanosine-3'-phosphate
  modified_base 15: mod_base = OTHER; note = 2'-O-methyluridine-3'-phosphate
  modified_base 16: mod_base = OTHER; note = 2'-O-methylguanosine-3'-phosphate
  modified_base 17: mod_base = OTHER; note = 2'-O-methyladenosine-3'-phosphate
  modified_base 18: mod_base = OTHER; note = 2'-O-methyladenosine-3'-phosphate
  modified_base 19: mod_base = OTHER; note = 2'-O-methyladenosine-3'-phosphate
  modified_base 20: mod_base = OTHER; note = 2'-O-methylguanosine-3'-phosphate
  modified_base 21: mod_base = OTHER; note = 2'-O-methyladenosine-3'-phosphate conjugated at the 3'-end to a tri-N-acetylgalactosamine ligand
ggagcccaagaaagtgaaaga

SEQ ID NO: 27 - RNA, 23 nt, synthetic construct
  source 1..23: mol_type = other RNA
  modified_base 1: mod_base = OTHER; note = 2'-O-methyluridine-3'-phosphorothioate
  modified_base 2: mod_base = OTHER; note = 2'-deoxy-2'-fluorocytidine-3'-phosphorothioate
  modified_base 3: mod_base = OTHER; note = 2'-O-methyluridine-3'-phosphate
  modified_base 4: mod_base = OTHER; note = 2'-O-methyluridine-3'-phosphate
  modified_base 5: mod_base = OTHER; note = 2'-O-methyluridine-3'-phosphate
  modified_base 6: mod_base = OTHER; note = Cytidine or isocytidine-glycol nucleic acid (GNA), S-isomer
  modified_base 7: mod_base = OTHER; note = 2'-O-methyladenosine-3'-phosphate
  modified_base 8: mod_base = OTHER; note = 2'-O-methylcytidine-3'-phosphate
  modified_base 9: mod_base = OTHER; note = 2'-O-methyluridine-3'-phosphate
  modified_base 10: mod_base = OTHER; note = 2'-O-methyluridine-3'-phosphate
  modified_base 11: mod_base = OTHER; note = 2'-O-methyluridine-3'-phosphate
  modified_base 12: mod_base = OTHER; note = 2'-O-methylcytidine-3'-phosphate
  modified_base 13: mod_base = OTHER; note = 2'-O-methyluridine-3'-phosphate
  modified_base 14: mod_base = OTHER; note = 2'-deoxy-2'-fluorouridine-3'-phosphate
  modified_base 15: mod_base = OTHER; note = 2'-O-methylguanosine-3'-phosphate
  modified_base 16: mod_base = OTHER; note = 2'-deoxy-2'-fluoroguanosine-3'-phosphate
  modified_base 17: mod_base = OTHER; note = 2'-O-methylguanosine-3'-phosphate
  modified_base 18: mod_base = OTHER; note = 2'-O-methylcytidine-3'-phosphate
  modified_base 19: mod_base = OTHER; note = 2'-O-methyluridine-3'-phosphate
  modified_base 20: mod_base = OTHER; note = 2'-O-methylcytidine-3'-phosphate
  modified_base 21: mod_base = OTHER; note = 2'-O-methylcytidine-3'-phosphorothioate
  modified_base 22: mod_base = OTHER; note = 2'-O-methyladenosine-3'-phosphorothioate
  modified_base 23: mod_base = OTHER; note = 2'-O-methylcytidine
tctttcactttcttgggctccac

SEQ ID NO: 28 - RNA, 19 nt, synthetic construct
  source 1..19: mol_type = other RNA
  modified_base 1: mod_base = OTHER; note = 2'-O-methylcytidine-3'-phosphorothioate
  modified_base 2: mod_base = OTHER; note = 2'-O-methyladenosine-3'-phosphorothioate
  modified_base 3: mod_base = OTHER; note = 2'-O-methylguanosine-3'-phosphate
  modified_base 4: mod_base = OTHER; note = 2'-O-methyluridine-3'-phosphate
  modified_base 5: mod_base = OTHER; note = 2'-deoxy-2'-fluoroguanosine-3'-phosphate
  modified_base 6: mod_base = OTHER; note = 2'-O-methyluridine-3'-phosphate
  modified_base 7: mod_base = OTHER; note = 2'-deoxy-2'-fluorouridine-3'-phosphate
  modified_base 8: mod_base = OTHER; note = 2'-deoxy-2'-fluorocytidine-3'-phosphate
  modified_base 9: mod_base = OTHER; note = 2'-deoxy-2'-fluorouridine-3'-phosphate
  modified_base 10: mod_base = OTHER; note = 2'-O-methyluridine-3'-phosphate
  modified_base 11: mod_base = OTHER; note = 2'-O-methylguanosine-3'-phosphate
  modified_base 12: mod_base = OTHER; note = 2'-O-methylcytidine-3'-phosphate
  modified_base 13: mod_base = OTHER; note = 2'-O-methyluridine-3'-phosphate
  modified_base 14: mod_base = OTHER; note = 2'-O-methylcytidine-3'-phosphate
  modified_base 15: mod_base = OTHER; note = 2'-O-methyluridine-3'-phosphate
  modified_base 16: mod_base = OTHER; note = 2'-O-methyladenosine-3'-phosphate
  modified_base 17: mod_base = OTHER; note = 2'-O-methyluridine-3'-phosphate
  modified_base 18: mod_base = OTHER; note = 2'-O-methyladenosine-3'-phosphate
  modified_base 19: mod_base = OTHER; note = 2'-O-methyladenosine-3'-phosphate conjugated at the 3'-end to a second oligonucleotide through a Q327 ligand
cagtgttcttgctctataa

SEQ ID NO: 29 - RNA, 22 nt, synthetic construct
  source 1..22: mol_type = other RNA
  modified_base 1: mod_base = OTHER; note = 2'-deoxy-2'-fluoroguanosine-3'-phosphate conjugated at the 5'-end to a second oligonucleotide through a Q327 ligand
  modified_base 2: mod_base = OTHER; note = 2'-deoxy-2'-fluoroadenosine-3'-phosphate
  modified_base 3: mod_base = OTHER; note = 2'-deoxy-2'-fluorouridine-3'-phosphate
  modified_base 4: mod_base = OTHER; note = 2'-O-methylguanosine-3'-phosphorothioate
  modified_base 5: mod_base = OTHER; note = 2'-O-methylguanosine-3'-phosphorothioate
  modified_base 6: mod_base = OTHER; note = 2'-O-methyladenosine-3'-phosphate
  modified_base 7: mod_base = OTHER; note = 2'-O-methyluridine-3'-phosphate
  modified_base 8: mod_base = OTHER; note = 2'-deoxy-2'-fluorocytidine-3'-phosphate
  modified_base 9: mod_base = OTHER; note = 2'-O-methyladenosine-3'-phosphate
  modified_base 10: mod_base = OTHER; note = 2'-deoxy-2'-fluorouridine-3'-phosphate
  modified_base 11: mod_base = OTHER; note = 2'-deoxy-2'-fluorocytidine-3'-phosphate
  modified_base 12: mod_base = OTHER; note = 2'-deoxy-2'-fluorouridine-3'-phosphate
  modified_base 13: mod_base = OTHER; note = 2'-O-methylcytidine-3'-phosphate
  modified_base 14: mod_base = OTHER; note = 2'-O-methyladenosine-3'-phosphate
  modified_base 15: mod_base = OTHER; note = 2'-O-methyladenosine-3'-phosphate
  modified_base 16: mod_base = OTHER; note = 2'-O-methylguanosine-3'-phosphate
  modified_base 17: mod_base = OTHER; note = 2'-O-methyluridine-3'-phosphate
  modified_base 18: mod_base = OTHER; note = 2'-O-methylcytidine-3'-phosphate
  modified_base 19: mod_base = OTHER; note = 2'-O-methyluridine-3'-phosphate
  modified_base 20: mod_base = OTHER; note = 2'-O-methyluridine-3'-phosphate
  modified_base 21: mod_base = OTHER; note = 2'-O-methyladenosine-3'-phosphate
  modified_base 22: mod_base = OTHER; note = 2'-O-methyladenosine-3'-phosphate conjugated at the 3'-end to a tri-N-acetylgalactosamine ligand
gatggatcatctcaagtcttaa

SEQ ID NO: 30 - RNA, 21 nt, synthetic construct
  source 1..21: mol_type = other RNA
  modified_base 1: mod_base = OTHER; note = 2'-O-methyluridine-3'-phosphorothioate
  modified_base 2: mod_base = OTHER; note = 2'-deoxy-2'-fluorouridine-3'-phosphorothioate
  modified_base 3: mod_base = OTHER; note = 2'-O-methyladenosine-3'-phosphate
  modified_base 4: mod_base = OTHER; note = 2'-O-methyluridine-3'-phosphate
  modified_base 5: mod_base = OTHER; note = 2'-O-methyladenosine-3'-phosphate
  modified_base 6: mod_base = OTHER; note = 2'-deoxy-2'-fluoroguanosine-3'-phosphate
  modified_base 7: mod_base = OTHER; note = 2'-O-methyladenosine-3'-phosphate
  modified_base 8: mod_base = OTHER; note = 2'-deoxy-2'-fluoroguanosine-3'-phosphate
  modified_base 9: mod_base = OTHER; note = 2'-deoxy-2'-fluorocytidine-3'-phosphate
  modified_base 10: mod_base = OTHER; note = 2'-O-methyladenosine-3'-phosphate
  modified_base 11: mod_base = OTHER; note = 2'-O-methyladenosine-3'-phosphate
  modified_base 12: mod_base = OTHER; note = 2'-O-methylguanosine-3'-phosphate
  modified_base 13: mod_base = OTHER; note = 2'-O-methyladenosine-3'-phosphate
  modified_base 14: mod_base = OTHER; note = 2'-deoxy-2'-fluoroadenosine-3'-phosphate
  modified_base 15: mod_base = OTHER; note = 2'-O-methylcytidine-3'-phosphate
  modified_base 16: mod_base = OTHER; note = 2'-deoxy-2'-fluoroadenosine-3'-phosphate
  modified_base 17: mod_base = OTHER; note = 2'-O-methylcytidine-3'-phosphate
  modified_base 18: mod_base = OTHER; note = 2'-O-methyluridine-3'-phosphate
  modified_base 19: mod_base = OTHER; note = 2'-O-methylguanosine-3'-phosphorothioate
  modified_base 20: mod_base = OTHER; note = 2'-O-methyluridine-3'-phosphorothioate
  modified_base 21: mod_base = OTHER; note = 2'-O-methyluridine
ttatagagcaagaacactgtt

SEQ ID NO: 31 - RNA, 21 nt, synthetic construct
  source 1..21: mol_type = other RNA
  modified_base 1: mod_base = OTHER; note = 2'-O-methyluridine-3'-phosphorothioate
  modified_base 2: mod_base = OTHER; note = 2'-deoxy-2'-fluorouridine-3'-phosphorothioate
  modified_base 3: mod_base = OTHER; note = 2'-O-methyladenosine-3'-phosphate
  modified_base 4: mod_base = OTHER; note = 2'-O-methyladenosine-3'-phosphate
  modified_base 5: mod_base = OTHER; note = 2'-O-methylguanosine-3'-phosphate
  modified_base 6: mod_base = OTHER; note = 2'-deoxy-2'-fluoroadenosine-3'-phosphate
  modified_base 7: mod_base = OTHER; note = 2'-O-methylcytidine-3'-phosphate
  modified_base 8: mod_base = OTHER; note = 2'-O-methyluridine-3'-phosphate
  modified_base 9: mod_base = OTHER; note = 2'-deoxy-2'-fluorouridine-3'-phosphate
  modified_base 10: mod_base = OTHER; note = 2'-O-methylguanosine-3'-phosphate
  modified_base 11: mod_base = OTHER; note = 2'-O-methyladenosine-3'-phosphate
  modified_base 12: mod_base = OTHER; note = 2'-O-methylguanosine-3'-phosphate
  modified_base 13: mod_base = OTHER; note = 2'-O-methyladenosine-3'-phosphate
  modified_base 14: mod_base = OTHER; note = 2'-deoxy-2'-fluorouridine-3'-phosphate
  modified_base 15: mod_base = OTHER; note = 2'-O-methylguanosine-3'-phosphate
  modified_base 16: mod_base = OTHER; note = 2'-deoxy-2'-fluoroadenosine-3'-phosphate
  modified_base 17: mod_base = OTHER; note = 2'-O-methyluridine-3'-phosphate
  modified_base 18: mod_base = OTHER; note = 2'-O-methylcytidine-3'-phosphate
  modified_base 19: mod_base = OTHER; note = 2'-O-methylcytidine-3'-phosphorothioate
  modified_base 20: mod_base = OTHER; note = 2'-O-methyluridine-3'-phosphorothioate
  modified_base 21: mod_base = OTHER; note = 2'-O-methylguanosine
ttaagacttgagatgatcctg

SEQ ID NO: 32 - RNA, 19 nt, synthetic construct
  source 1..19: mol_type = other RNA
  modified_base 1: mod_base = OTHER; note = 2'-O-methylcytidine-3'-phosphorothioate conjugated at the 5'-end to a second oligonucleotide through a Q328 ligand
  modified_base 2: mod_base = OTHER; note = 2'-O-methyladenosine-3'-phosphorothioate
  modified_base 3: mod_base = OTHER; note = 2'-O-methylguanosine-3'-phosphate
  modified_base 4: mod_base = OTHER; note = 2'-O-methyluridine-3'-phosphate
  modified_base 5: mod_base = OTHER; note = 2'-deoxy-2'-fluoroguanosine-3'-phosphate
  modified_base 6: mod_base = OTHER; note = 2'-O-methyluridine-3'-phosphate
  modified_base 7: mod_base = OTHER; note = 2'-deoxy-2'-fluorouridine-3'-phosphate
  modified_base 8: mod_base = OTHER; note = 2'-deoxy-2'-fluorocytidine-3'-phosphate
  modified_base 9: mod_base = OTHER; note = 2'-deoxy-2'-fluorouridine-3'-phosphate
  modified_base 10: mod_base = OTHER; note = 2'-O-methyluridine-3'-phosphate
  modified_base 11: mod_base = OTHER; note = 2'-O-methylguanosine-3'-phosphate
  modified_base 12: mod_base = OTHER; note = 2'-O-methylcytidine-3'-phosphate
  modified_base 13: mod_base = OTHER; note = 2'-O-methyluridine-3'-phosphate
  modified_base 14: mod_base = OTHER; note = 2'-O-methylcytidine-3'-phosphate
  modified_base 15: mod_base = OTHER; note = 2'-O-methyluridine-3'-phosphate
  modified_base 16: mod_base = OTHER; note = 2'-O-methyladenosine-3'-phosphate
  modified_base 17: mod_base = OTHER; note = 2'-O-methyluridine-3'-phosphorothioate
  modified_base 18: mod_base = OTHER; note = 2'-O-methyladenosine-3'-phosphorothioate
  modified_base 19: mod_base = OTHER; note = 2'-O-methyladenosine
cagtgttcttgctctataa

SEQ ID NO: 33 - RNA, 22 nt, synthetic construct
  source 1..22: mol_type = other RNA
  modified_base 1: mod_base = OTHER; note = 2'-deoxy-2'-fluoroguanosine-3'-phosphate conjugated at the 5'-end to a second oligonucleotide through a Q328 ligand
  modified_base 2: mod_base = OTHER; note = 2'-deoxy-2'-fluoroadenosine-3'-phosphate
  modified_base 3: mod_base = OTHER; note = 2'-deoxy-2'-fluorouridine-3'-phosphate
  modified_base 4: mod_base = OTHER; note = 2'-O-methylguanosine-3'-phosphorothioate
  modified_base 5: mod_base = OTHER; note = 2'-O-methylguanosine-3'-phosphorothioate
  modified_base 6: mod_base = OTHER; note = 2'-O-methyladenosine-3'-phosphate
  modified_base 7: mod_base = OTHER; note = 2'-O-methyluridine-3'-phosphate
  modified_base 8: mod_base = OTHER; note = 2'-deoxy-2'-fluorocytidine-3'-phosphate
  modified_base 9: mod_base = OTHER; note = 2'-O-methyladenosine-3'-phosphate
  modified_base 10: mod_base = OTHER; note = 2'-deoxy-2'-fluorouridine-3'-phosphate
  modified_base 11: mod_base = OTHER; note = 2'-deoxy-2'-fluorocytidine-3'-phosphate
  modified_base 12: mod_base = OTHER; note = 2'-deoxy-2'-fluorouridine-3'-phosphate
  modified_base 13: mod_base = OTHER; note = 2'-O-methylcytidine-3'-phosphate
  modified_base 14: mod_base = OTHER; note = 2'-O-methyladenosine-3'-phosphate
  modified_base 15: mod_base = OTHER; note = 2'-O-methyladenosine-3'-phosphate
  modified_base 16: mod_base = OTHER; note = 2'-O-methylguanosine-3'-phosphate
  modified_base 17: mod_base = OTHER; note = 2'-O-methyluridine-3'-phosphate
  modified_base 18: mod_base = OTHER; note = 2'-O-methylcytidine-3'-phosphate
  modified_base 19: mod_base = OTHER; note = 2'-O-methyluridine-3'-phosphate
  modified_base 20: mod_base = OTHER; note = 2'-O-methyluridine-3'-phosphate
  modified_base 21: mod_base = OTHER; note = 2'-O-methyladenosine-3'-phosphate
  modified_base 22: mod_base = OTHER; note = 2'-O-methyladenosine-3'-phosphate conjugated at the 3'-end to a tri-N-acetylgalactosamine ligand
gatggatcatctcaagtcttaa

SEQ ID NO: 34 - RNA, 21 nt, synthetic construct
  source 1..21: mol_type = other RNA
  modified_base 1: mod_base = OTHER; note = 2'-O-methyluridine-3'-phosphorothioate
  modified_base 2: mod_base = OTHER; note = 2'-deoxy-2'-fluorouridine-3'-phosphorothioate
  modified_base 3: mod_base = OTHER; note = 2'-O-methyladenosine-3'-phosphate
  modified_base 4: mod_base = OTHER; note = 2'-O-methyluridine-3'-phosphate
  modified_base 5: mod_base = OTHER; note = 2'-O-methyladenosine-3'-phosphate
  modified_base 6: mod_base = OTHER; note = 2'-deoxy-2'-fluoroguanosine-3'-phosphate
  modified_base 7: mod_base = OTHER; note = 2'-O-methyladenosine-3'-phosphate
  modified_base 8: mod_base = OTHER; note = 2'-deoxy-2'-fluoroguanosine-3'-phosphate
  modified_base 9: mod_base = OTHER; note = 2'-deoxy-2'-fluorocytidine-3'-phosphate
  modified_base 10: mod_base = OTHER; note = 2'-O-methyladenosine-3'-phosphate
  modified_base 11: mod_base = OTHER; note = 2'-O-methyladenosine-3'-phosphate
  modified_base 12: mod_base = OTHER; note = 2'-O-methylguanosine-3'-phosphate
  modified_base 13: mod_base = OTHER; note = 2'-O-methyladenosine-3'-phosphate
  modified_base 14: mod_base = OTHER; note = 2'-deoxy-2'-fluoroadenosine-3'-phosphate
  modified_base 15: mod_base = OTHER; note = 2'-O-methylcytidine-3'-phosphate
  modified_base 16: mod_base = OTHER; note = 2'-deoxy-2'-fluoroadenosine-3'-phosphate
  modified_base 17: mod_base = OTHER; note = 2'-O-methylcytidine-3'-phosphate
  modified_base 18: mod_base = OTHER; note = 2'-O-methyluridine-3'-phosphate
  modified_base 19: mod_base = OTHER; note = 2'-O-methylguanosine-3'-phosphorothioate
  modified_base 20: mod_base = OTHER; note = 2'-O-methyluridine-3'-phosphorothioate
  modified_base 21: mod_base = OTHER; note = 2'-O-methyluridine
ttatagagcaagaacactgtt

SEQ ID NO: 35 - RNA, 21 nt, synthetic construct
  source 1..21: mol_type = other RNA
  modified_base 1: mod_base = OTHER; note = 2'-O-methyluridine-3'-phosphorothioate
  modified_base 2: mod_base = OTHER; note = 2'-deoxy-2'-fluorouridine-3'-phosphorothioate
  modified_base 3: mod_base = OTHER; note = 2'-O-methyladenosine-3'-phosphate
  modified_base 4: mod_base = OTHER; note = 2'-O-methyladenosine-3'-phosphate
  modified_base 5: mod_base = OTHER; note = 2'-O-methylguanosine-3'-phosphate
  modified_base 6: mod_base = OTHER; note = 2'-deoxy-2'-fluoroadenosine-3'-phosphate
  modified_base 7: mod_base = OTHER; note = 2'-O-methylcytidine-3'-phosphate
  modified_base 8: mod_base = OTHER; note = 2'-O-methyluridine-3'-phosphate
  modified_base 9: mod_base = OTHER; note = 2'-deoxy-2'-fluorouridine-3'-phosphate
  modified_base 10: mod_base = OTHER; note = 2'-O-methylguanosine-3'-phosphate
  modified_base 11: mod_base = OTHER; note = 2'-O-methyladenosine-3'-phosphate
  modified_base 12: mod_base = OTHER; note = 2'-O-methylguanosine-3'-phosphate
  modified_base 13: mod_base = OTHER; note = 2'-O-methyladenosine-3'-phosphate
  modified_base 14: mod_base = OTHER; note = 2'-deoxy-2'-fluorouridine-3'-phosphate
  modified_base 15: mod_base = OTHER; note = 2'-O-methylguanosine-3'-phosphate
  modified_base 16: mod_base = OTHER; note = 2'-deoxy-2'-fluoroadenosine-3'-phosphate
  modified_base 17: mod_base = OTHER; note = 2'-O-methyluridine-3'-phosphate
  modified_base 18: mod_base = OTHER; note = 2'-O-methylcytidine-3'-phosphate
  modified_base 19: mod_base = OTHER; note = 2'-O-methylcytidine-3'-phosphorothioate
  modified_base 20: mod_base = OTHER; note = 2'-O-methyluridine-3'-phosphorothioate
  modified_base 21: mod_base = OTHER; note = 2'-O-methylguanosine
ttaagacttgagatgatcctg

SEQ ID NO: 36 - RNA, 21 nt, synthetic construct
  source 1..21: mol_type = other RNA
  modified_base 1: mod_base = OTHER; note = 2'-O-methyladenosine-3'-phosphorothioate
  modified_base 2: mod_base = OTHER; note = 2'-O-methyladenosine-3'-phosphorothioate
  modified_base 3: mod_base = OTHER; note = 2'-O-methylcytidine-3'-phosphate
  modified_base 4: mod_base = OTHER; note = 2'-O-methyladenosine-3'-phosphate
  modified_base 5: mod_base = OTHER; note = 2'-O-methylguanosine-3'-phosphate
  modified_base 6: mod_base = OTHER; note = 2'-O-methyluridine-3'-phosphate
  modified_base 7: mod_base = OTHER; note = 2'-deoxy-2'-fluoroguanosine-3'-phosphate
  modified_base 8: mod_base = OTHER; note = 2'-O-methyluridine-3'-phosphate
  modified_base 9: mod_base = OTHER; note = 2'-deoxy-2'-fluorouridine-3'-phosphate
  modified_base 10: mod_base = OTHER; note = 2'-deoxy-2'-fluorocytidine-3'-phosphate
  modified_base 11: mod_base = OTHER; note = 2'-deoxy-2'-fluorouridine-3'-phosphate
  modified_base 12: mod_base = OTHER; note = 2'-O-methyluridine-3'-phosphate
  modified_base 13: mod_base = OTHER; note = 2'-O-methylguanosine-3'-phosphate
  modified_base 14: mod_base = OTHER; note = 2'-O-methylcytidine-3'-phosphate
  modified_base 15: mod_base = OTHER; note = 2'-O-methyluridine-3'-phosphate
  modified_base 16: mod_base = OTHER; note = 2'-O-methylcytidine-3'-phosphate
  modified_base 17: mod_base = OTHER; note = 2'-O-methyluridine-3'-phosphate
  modified_base 18: mod_base = OTHER; note = 2'-O-methyladenosine-3'-phosphate
  modified_base 19: mod_base = OTHER; note = 2'-O-methyluridine-3'-phosphate
  modified_base 20: mod_base = OTHER; note = 2'-O-methyladenosine-3'-phosphate
  modified_base 21: mod_base = OTHER; note = 2'-O-methyladenosine-3'-phosphate conjugated at the 3'-end to a second oligonucleotide through a Q327 ligand
aacagtgttcttgctctataa

SEQ ID NO: 37 - RNA, 24 nt, synthetic construct
  source 1..24: mol_type = other RNA
  modified_base 1: mod_base = OTHER; note = 2'-deoxy-2'-fluoroguanosine-3'-phosphate conjugated at the 5'-end to a second oligonucleotide through a Q327 ligand
  modified_base 2: mod_base = OTHER; note = 2'-deoxy-2'-fluoroadenosine-3'-phosphate
  modified_base 3: mod_base = OTHER; note = 2'-deoxy-2'-fluorouridine-3'-phosphate
  modified_base 4: mod_base = OTHER; note = 2'-O-methylcytidine-3'-phosphorothioate
  modified_base 5: mod_base = OTHER; note = 2'-O-methyladenosine-3'-phosphorothioate
  modified_base 6: mod_base = OTHER; note = 2'-O-methylguanosine-3'-phosphate
  modified_base 7: mod_base = OTHER; note = 2'-O-methylguanosine-3'-phosphate
  modified_base 8: mod_base = OTHER; note = 2'-O-methyladenosine-3'-phosphate
  modified_base 9: mod_base = OTHER; note = 2'-O-methyluridine-3'-phosphate
  modified_base 10: mod_base = OTHER; note = 2'-deoxy-2'-fluorocytidine-3'-phosphate
  modified_base 11: mod_base = OTHER; note = 2'-O-methyladenosine-3'-phosphate
  modified_base 12: mod_base = OTHER; note = 2'-deoxy-2'-fluorouridine-3'-phosphate
  modified_base 13: mod_base = OTHER; note = 2'-deoxy-2'-fluorocytidine-3'-phosphate
  modified_base 14: mod_base = OTHER; note = 2'-deoxy-2'-fluorouridine-3'-phosphate
  modified_base 15: mod_base = OTHER; note = 2'-O-methylcytidine-3'-phosphate
  modified_base 16: mod_base = OTHER; note = 2'-O-methyladenosine-3'-phosphate
  modified_base 17: mod_base = OTHER; note = 2'-O-methyladenosine-3'-phosphate
  modified_base 18: mod_base = OTHER; note = 2'-O-methylguanosine-3'-phosphate
  modified_base 19: mod_base = OTHER; note = 2'-O-methyluridine-3'-phosphate
  modified_base 20: mod_base = OTHER; note = 2'-O-methylcytidine-3'-phosphate
  modified_base 21: mod_base = OTHER; note = 2'-O-methyluridine-3'-phosphate
  modified_base 22: mod_base = OTHER; note = 2'-O-methyluridine-3'-phosphate
  modified_base 23: mod_base = OTHER; note = 2'-O-methyladenosine-3'-phosphate
  modified_base 24: mod_base = OTHER; note = 2'-O-methyladenosine-3'-phosphate conjugated at the 3'-end to a tri-N-acetylgalactosamine ligand
gatcaggatcatctcaagtcttaa

SEQ ID NO: 38 - RNA, 23 nt, synthetic construct
  source 1..23: mol_type = other RNA
  modified_base 1: mod_base = OTHER; note = 2'-O-methyluridine-3'-phosphorothioate
  modified_base 2: mod_base = OTHER; note = 2'-deoxy-2'-fluorouridine-3'-phosphorothioate
  modified_base 3: mod_base = OTHER; note = 2'-O-methyladenosine-3'-phosphate
  modified_base 4: mod_base = OTHER; note = 2'-O-methyluridine-3'-phosphate
  modified_base 5: mod_base = OTHER; note = 2'-O-methyladenosine-3'-phosphate
  modified_base 6: mod_base = OTHER; note = 2'-deoxy-2'-fluoroguanosine-3'-phosphate
  modified_base 7: mod_base = OTHER; note = 2'-O-methyladenosine-3'-phosphate
  modified_base 8: mod_base = OTHER; note = 2'-deoxy-2'-fluoroguanosine-3'-phosphate
  modified_base 9: mod_base = OTHER; note = 2'-deoxy-2'-fluorocytidine-3'-phosphate
  modified_base 10: mod_base = OTHER; note = 2'-O-methyladenosine-3'-phosphate
  modified_base 11: mod_base = OTHER; note = 2'-O-methyladenosine-3'-phosphate
  modified_base 12: mod_base = OTHER; note = 2'-O-methylguanosine-3'-phosphate
  modified_base 13: mod_base = OTHER; note = 2'-O-methyladenosine-3'-phosphate
  modified_base 14: mod_base = OTHER; note = 2'-deoxy-2'-fluoroadenosine-3'-phosphate
  modified_base 15: mod_base = OTHER; note = 2'-O-methylcytidine-3'-phosphate
  modified_base 16: mod_base = OTHER; note = 2'-deoxy-2'-fluoroadenosine-3'-phosphate
  modified_base 17: mod_base = OTHER; note = 2'-O-methylcytidine-3'-phosphate
  modified_base 18: mod_base = OTHER; note = 2'-O-methyluridine-3'-phosphate
  modified_base 19: mod_base = OTHER; note = 2'-O-methylguanosine-3'-phosphate
  modified_base 20: mod_base = OTHER; note = 2'-O-methyluridine-3'-phosphate
  modified_base 21: mod_base = OTHER; note = 2'-O-methyluridine-3'-phosphorothioate
  modified_base 22: mod_base = OTHER; note = 2'-O-methyluridine-3'-phosphorothioate
  modified_base 23: mod_base = OTHER; note = 2'-O-methyluridine
ttatagagcaagaacactgtttt

SEQ ID NO: 39 - RNA, 23 nt, synthetic construct
  source 1..23: mol_type = other RNA
  modified_base 1: mod_base = OTHER; note = 2'-O-methyluridine-3'-phosphorothioate
  modified_base 2: mod_base = OTHER; note = 2'-deoxy-2'-fluorouridine-3'-phosphorothioate
  modified_base 3: mod_base = OTHER; note = 2'-O-methyladenosine-3'-phosphate
  modified_base 4: mod_base = OTHER; note = 2'-O-methyladenosine-3'-phosphate
  modified_base 5: mod_base = OTHER; note = 2'-O-methylguanosine-3'-phosphate
  modified_base 6: mod_base = OTHER; note = 2'-deoxy-2'-fluoroadenosine-3'-phosphate
  modified_base 7: mod_base = OTHER; note = 2'-O-methylcytidine-3'-phosphate
  modified_base 8: mod_base = OTHER; note = 2'-O-methyluridine-3'-phosphate
  modified_base 9: mod_base = OTHER; note = 2'-deoxy-2'-fluorouridine-3'-phosphate
  modified_base 10: mod_base = OTHER; note = 2'-O-methylguanosine-3'-phosphate
  modified_base 11: mod_base = OTHER; note = 2'-O-methyladenosine-3'-phosphate
  modified_base 12: mod_base = OTHER; note = 2'-O-methylguanosine-3'-phosphate
  modified_base 13: mod_base = OTHER; note = 2'-O-methyladenosine-3'-phosphate
  modified_base 14: mod_base = OTHER; note = 2'-deoxy-2'-fluorouridine-3'-phosphate
  modified_base 15: mod_base = OTHER; note = 2'-O-methylguanosine-3'-phosphate
  modified_base 16: mod_base = OTHER; note = 2'-deoxy-2'-fluoroadenosine-3'-phosphate
  modified_base 17: mod_base = OTHER; note = 2'-O-methyluridine-3'-phosphate
  modified_base 18: mod_base = OTHER; note = 2'-O-methylcytidine-3'-phosphate
  modified_base 19: mod_base = OTHER; note = 2'-O-methylcytidine-3'-phosphate
  modified_base 20: mod_base = OTHER; note = 2'-O-methyluridine-3'-phosphate
  modified_base 21: mod_base = OTHER; note = 2'-O-methylguanosine-3'-phosphorothioate
  modified_base 22: mod_base = OTHER; note = 2'-O-methylguanosine-3'-phosphorothioate
  modified_base 23: mod_base = OTHER; note = 2'-O-methylcytidine
ttaagacttgagatgatcctggc

SEQ ID NO: 40 - RNA, 21 nt, synthetic construct
  source 1..21: mol_type = other RNA
  modified_base 1: mod_base = OTHER; note = 2'-O-methyladenosine-3'-phosphorothioate
  modified_base 2: mod_base = OTHER; note = 2'-O-methyladenosine-3'-phosphorothioate
  modified_base 3: mod_base = OTHER; note = 2'-O-methylcytidine-3'-phosphate
  modified_base 4: mod_base = OTHER; note = 2'-O-methyladenosine-3'-phosphate
  modified_base 5: mod_base = OTHER; note = 2'-O-methylguanosine-3'-phosphate
  modified_base 6: mod_base = OTHER; note = 2'-O-methyluridine-3'-phosphate
  modified_base 7: mod_base = OTHER; note = 2'-deoxy-2'-fluoroguanosine-3'-phosphate
  modified_base 8: mod_base = OTHER; note = 2'-O-methyluridine-3'-phosphate
  modified_base 9: mod_base = OTHER; note = 2'-deoxy-2'-fluorouridine-3'-phosphate
  modified_base 10: mod_base = OTHER; note = 2'-deoxy-2'-fluorocytidine-3'-phosphate
  modified_base 11: mod_base = OTHER; note = 2'-deoxy-2'-fluorouridine-3'-phosphate
  modified_base 12: mod_base = OTHER; note = 2'-O-methyluridine-3'-phosphate
  modified_base 13: mod_base = OTHER; note = 2'-O-methylguanosine-3'-phosphate
  modified_base 14: mod_base = OTHER; note = 2'-O-methylcytidine-3'-phosphate
  modified_base 15: mod_base = OTHER; note = 2'-O-methyluridine-3'-phosphate
  modified_base 16: mod_base = OTHER; note = 2'-O-methylcytidine-3'-phosphate
  modified_base 17: mod_base = OTHER; note = 2'-O-methyluridine-3'-phosphate
  modified_base 18: mod_base = OTHER; note = 2'-O-methyladenosine-3'-phosphate
  modified_base 19: mod_base = OTHER; note = 2'-O-methyluridine-3'-phosphate
  modified_base 20: mod_base = OTHER; note = 2'-O-methyladenosine-3'-phosphate
  modified_base 21: mod_base = OTHER; note = 2'-O-methyladenosine-3'-phosphate conjugated at the 3'-end to a second oligonucleotide through a Q324-Q303-Q303-Q303 ligand
aacagtgttcttgctctataa

SEQ ID NO: 41 - DNA, 22 bp, synthetic construct
  source 1..22: mol_type = other DNA
  modified_base 1: mod_base = OTHER; note = 2'-deoxyadenosine-3'-phosphate conjugated at the 5'-end to a second oligonucleotide through a Q324-Q303-Q303-Q303 ligand
  modified_base 2: mod_base = OTHER; note = 2'-O-methylcytidine-3'-phosphorothioate
  modified_base 3: mod_base = OTHER; note = 2'-O-methyladenosine-3'-phosphorothioate
  modified_base 4: mod_base = OTHER; note = 2'-O-methylguanosine-3'-phosphate
  modified_base 5: mod_base = OTHER; note = 2'-O-methylguanosine-3'-phosphate
  modified_base 6: mod_base = OTHER; note = 2'-O-methyladenosine-3'-phosphate
  modified_base 7: mod_base = OTHER; note = 2'-O-methyluridine-3'-phosphate
  modified_base 8: mod_base = OTHER; note = 2'-deoxy-2'-fluorocytidine-3'-phosphate
  modified_base 9: mod_base = OTHER; note = 2'-O-methyladenosine-3'-phosphate
  modified_base 10: mod_base = OTHER; note = 2'-deoxy-2'-fluorouridine-3'-phosphate
  modified_base 11: mod_base = OTHER; note = 2'-deoxy-2'-fluorocytidine-3'-phosphate
  modified_base 12: mod_base = OTHER; note = 2'-deoxy-2'-fluorouridine-3'-phosphate
  modified_base 13: mod_base = OTHER; note = 2'-O-methylcytidine-3'-phosphate
  modified_base 14: mod_base = OTHER; note = 2'-O-methyladenosine-3'-phosphate
  modified_base 15: mod_base = OTHER; note = 2'-O-methyladenosine-3'-phosphate
  modified_base 16: mod_base = OTHER; note = 2'-O-methylguanosine-3'-phosphate
  modified_base 17: mod_base = OTHER; note = 2'-O-methyluridine-3'-phosphate
  modified_base 18: mod_base = OTHER; note = 2'-O-methylcytidine-3'-phosphate
  modified_base 19: mod_base = OTHER; note = 2'-O-methyluridine-3'-phosphate
  modified_base 20: mod_base = OTHER; note = 2'-O-methyluridine-3'-phosphate
  modified_base 21: mod_base = OTHER; note = 2'-O-methyladenosine-3'-phosphate
  modified_base 22: mod_base = OTHER; note = 2'-O-methyladenosine-3'-phosphate conjugated at the 3'-end to a tri-N-acetylgalactosamine ligand
  misc_feature 2..22: note = RNA
  misc_feature 1: note = DNA
acaggatcatctcaagtcttaa

SEQ ID NO: 42 - RNA, 23 nt, synthetic construct
  source 1..23: mol_type = other RNA
  modified_base 1: mod_base = OTHER; note = 2'-O-methyluridine-3'-phosphorothioate
  modified_base 2: mod_base = OTHER; note = 2'-deoxy-2'-fluorouridine-3'-phosphorothioate
  modified_base 3: mod_base = OTHER; note = 2'-O-methyladenosine-3'-phosphate
  modified_base 4: mod_base = OTHER; note = 2'-O-methyluridine-3'-phosphate
  modified_base 5: mod_base = OTHER; note = 2'-O-methyladenosine-3'-phosphate
  modified_base 6: mod_base = OTHER; note = 2'-deoxy-2'-fluoroguanosine-3'-phosphate
  modified_base 7: mod_base = OTHER; note = 2'-O-methyladenosine-3'-phosphate
  modified_base 8: mod_base = OTHER; note = 2'-deoxy-2'-fluoroguanosine-3'-phosphate
  modified_base 9: mod_base = OTHER; note = 2'-deoxy-2'-fluorocytidine-3'-phosphate
  modified_base 10: mod_base = OTHER; note = 2'-O-methyladenosine-3'-phosphate
  modified_base 11: mod_base = OTHER; note = 2'-O-methyladenosine-3'-phosphate
  modified_base 12: mod_base = OTHER; note = 2'-O-methylguanosine-3'-phosphate
  modified_base 13: mod_base = OTHER; note = 2'-O-methyladenosine-3'-phosphate
  modified_base 14: mod_base = OTHER; note = 2'-deoxy-2'-fluoroadenosine-3'-phosphate
  modified_base 15: mod_base = OTHER; note = 2'-O-methylcytidine-3'-phosphate
  modified_base 16: mod_base = OTHER; note = 2'-deoxy-2'-fluoroadenosine-3'-phosphate
  modified_base 17: mod_base = OTHER; note = 2'-O-methylcytidine-3'-phosphate
  modified_base 18: mod_base = OTHER; note = 2'-O-methyluridine-3'-phosphate
  modified_base 19: mod_base = OTHER; note = 2'-O-methylguanosine-3'-phosphate
  modified_base 20: mod_base = OTHER; note = 2'-O-methyluridine-3'-phosphate
  modified_base 21: mod_base = OTHER; note = 2'-O-methyluridine-3'-phosphorothioate
  modified_base 22: mod_base = OTHER; note = 2'-O-methyluridine-3'-phosphorothioate
  modified_base 23: mod_base = OTHER; note = 2'-O-methyluridine
ttatagagcaagaacactgtttt

SEQ ID NO: 43 - RNA, 23 nt, synthetic construct
  source 1..23: mol_type = other RNA
  modified_base 1: mod_base = OTHER; note = 2'-O-methyluridine-3'-phosphorothioate
  modified_base 2: mod_base = OTHER; note = 2'-deoxy-2'-fluorouridine-3'-phosphorothioate
  modified_base 3: mod_base = OTHER; note = 2'-O-methyladenosine-3'-phosphate
  modified_base 4: mod_base = OTHER; note = 2'-O-methyladenosine-3'-phosphate
  modified_base 5: mod_base = OTHER; note = 2'-O-methylguanosine-3'-phosphate
  modified_base 6: mod_base = OTHER; note = 2'-deoxy-2'-fluoroadenosine-3'-phosphate
  modified_base 7: mod_base = OTHER; note = 2'-O-methylcytidine-3'-phosphate
  modified_base 8: mod_base = OTHER; note = 2'-O-methyluridine-3'-phosphate
  modified_base 9: mod_base = OTHER; note = 2'-deoxy-2'-fluorouridine-3'-phosphate
  modified_base 10: mod_base = OTHER; note = 2'-O-methylguanosine-3'-phosphate
  modified_base 11: mod_base = OTHER; note = 2'-O-methyladenosine-3'-phosphate
  modified_base 12: mod_base = OTHER; note = 2'-O-methylguanosine-3'-phosphate
  modified_base 13: mod_base = OTHER; note = 2'-O-methyladenosine-3'-phosphate
  modified_base 14: mod_base = OTHER; note = 2'-deoxy-2'-fluorouridine-3'-phosphate
  modified_base 15: mod_base = OTHER; note = 2'-O-methylguanosine-3'-phosphate
  modified_base 16: mod_base = OTHER; note = 2'-deoxy-2'-fluoroadenosine-3'-phosphate
  modified_base 17: mod_base = OTHER; note = 2'-O-methyluridine-3'-phosphate
  modified_base 18: mod_base = OTHER; note = 2'-O-methylcytidine-3'-phosphate
  modified_base 19: mod_base = OTHER; note = 2'-O-methylcytidine-3'-phosphate
  modified_base 20: mod_base = OTHER; note = 2'-O-methyluridine-3'-phosphate
  modified_base 21: mod_base = OTHER; note = 2'-O-methylguanosine-3'-phosphorothioate
  modified_base 22: mod_base = OTHER; note = 2'-O-methylguanosine-3'-phosphorothioate
  modified_base 23: mod_base = OTHER; note = 2'-O-methylcytidine
ttaagacttgagatgatcctggc

SEQ ID NO: 44 - RNA, 23 nt, synthetic construct
  source 1..23: mol_type = other RNA
  modified_base 1: mod_base = OTHER; note = 2'-O-methyluridine-3'-phosphorothioate 5'-(E)-Vinylphosphonate
  modified_base 2: mod_base = OTHER; note = 2'-deoxy-2'-fluorouridine-3'-phosphorothioate
  modified_base 3: mod_base = OTHER; note = 2'-O-methyladenosine-3'-phosphate
  modified_base 4: mod_base = OTHER; note = 2'-O-methylguanosine-3'-phosphate
  modified_base 5: mod_base = OTHER; note = 2'-O-methyladenosine-3'-phosphate
  modified_base 6: mod_base = OTHER; note = 2'-deoxy-2'-fluoroadenosine-3'-phosphate
  modified_base 7: mod_base = OTHER; note = 2'-O-methyladenosine-3'-phosphate
  modified_base 8: mod_base = OTHER; note = 2'-deoxy-2'-fluorouridine-3'-phosphate
  modified_base 9: mod_base = OTHER; note = 2'-deoxy-2'-fluoroadenosine-3'-phosphate
  modified_base 10: mod_base = OTHER; note = 2'-O-methyladenosine-3'-phosphate
  modified_base 11: mod_base = OTHER; note = 2'-O-methylguanosine-3'-phosphate
  modified_base 12: mod_base = OTHER; note = 2'-O-methyluridine-3'-phosphate
  modified_base 13: mod_base = OTHER; note = 2'-O-methylguanosine-3'-phosphate
  modified_base 14: mod_base = OTHER; note = 2'-deoxy-2'-fluoroguanosine-3'-phosphate
  modified_base 15: mod_base = OTHER; note = 2'-O-methyluridine-3'-phosphate
  modified_base 16: mod_base = OTHER; note = 2'-deoxy-2'-fluoroadenosine-3'-phosphate
  modified_base 17: mod_base = OTHER; note = 2'-O-methylguanosine-3'-phosphate
  modified_base 18: mod_base = OTHER; note = 2'-O-methyluridine-3'-phosphate
  modified_base 19: mod_base = OTHER; note = 2'-O-methylcytidine-3'-phosphate
  modified_base 20: mod_base = OTHER; note = 2'-O-methyladenosine-3'-phosphate
  modified_base 21: mod_base = OTHER; note = 2'-O-methylcytidine-3'-phosphorothioate
  modified_base 22: mod_base = OTHER; note = 2'-O-methyluridine-3'-phosphorothioate
  modified_base 23: mod_base = OTHER; note = 2'-O-methyluridine
ttagaaataagtggtagtcactt

SEQ ID NO: 45 - RNA, 23 nt, synthetic construct
  source 1..23: mol_type = other RNA
  modified_base 1: mod_base = OTHER; note = 2'-O-methyluridine-3'-phosphorothioate 5'-(E)-Vinylphosphonate
  modified_base 2: mod_base = OTHER; note = 2'-deoxy-2'-fluorouridine-3'-phosphorothioate
  modified_base 3: mod_base = OTHER; note = 2'-O-methyluridine-3'-phosphate
  modified_base 4: mod_base = OTHER; note = 2'-O-methylcytidine-3'-phosphate
  modified_base 5: mod_base = OTHER; note = 2'-O-methyluridine-3'-phosphate
  modified_base 6: mod_base = OTHER; note = 2'-deoxy-2'-fluoroguanosine-3'-phosphate
  modified_base 7: mod_base = OTHER; note = 2'-O-methylguanosine-3'-phosphate
  modified_base 8: mod_base = OTHER; note = 2'-deoxy-2'-fluorocytidine-3'-phosphate
  modified_base 9: mod_base = OTHER; note = 2'-deoxy-2'-fluoroadenosine-3'-phosphate
  modified_base 10: mod_base = OTHER; note = 2'-O-methyluridine-3'-phosphate
  modified_base 11: mod_base = OTHER; note = 2'-O-methyluridine-3'-phosphate
  modified_base 12: mod_base = OTHER; note = 2'-O-methylcytidine-3'-phosphate
  modified_base 13: mod_base = OTHER; note = 2'-O-methyluridine-3'-phosphate
  modified_base 14: mod_base = OTHER; note = 2'-deoxy-2'-fluorouridine-3'-phosphate
  modified_base 15: mod_base = OTHER; note = 2'-O-methylcytidine-3'-phosphate
  modified_base 16: mod_base = OTHER; note = 2'-deoxy-2'-fluoroadenosine-3'-phosphate
  modified_base 17: mod_base = OTHER; note = 2'-O-methyluridine-3'-phosphate
  modified_base 18: mod_base = OTHER; note = 2'-O-methyluridine-3'-phosphate
  modified_base 19: mod_base = OTHER; note = 2'-O-methyluridine-3'-phosphate
  modified_base 20: mod_base = OTHER; note = 2'-O-methylguanosine-3'-phosphate
  modified_base 21: mod_base = OTHER; note = 2'-O-methyluridine-3'-phosphorothioate
  modified_base 22: mod_base = OTHER; note = 2'-O-methyluridine-3'-phosphorothioate
  modified_base 23: mod_base = OTHER; note = 2'-O-methyladenosine
tttctggcattcttcatttgtta

SEQ ID NO: 46 - RNA, 23 nt, synthetic construct
  source 1..23: mol_type = other RNA
  modified_base 1: mod_base = OTHER; note = 2'-O-methyluridine-3'-phosphate 5'-(E)-Vinylphosphonate
  modified_base 2: mod_base = OTHER; note = 2'-deoxy-2'-fluoroadenosine-3'-phosphate
  modified_base 3: mod_base = OTHER; note = 2'-O-methyladenosine-3'-phosphate
  modified_base 4: mod_base = OTHER; note = 2'-O-methyladenosine-3'-phosphate
  modified_base 5: mod_base = OTHER; note = 2'-O-methylguanosine-3'-phosphate
  modified_base 6: mod_base = OTHER; note = 2'-deoxy-2'-fluorocytidine-3'-phosphate
  modified_base 7: mod_base = OTHER; note = 2'-O-methyladenosine-3'-phosphate
  modified_base 8: mod_base = OTHER; note = 2'-O-methylcytidine-3'-phosphate
  modified_base 9: mod_base = OTHER; note = 2'-O-methyluridine-3'-phosphate
  modified_base 10: mod_base = OTHER; note = 2'-O-methyluridine-3'-phosphate
  modified_base 11: mod_base = OTHER; note = 2'-O-methyluridine-3'-phosphate
  modified_base 12: mod_base = OTHER; note = 2'-O-methyladenosine-3'-phosphate
  modified_base 13: mod_base = OTHER; note = 2'-O-methyluridine-3'-phosphate
  modified_base 14: mod_base = OTHER; note = 2'-deoxy-2'-fluorouridine-3'-phosphate
  modified_base 15: mod_base = OTHER; note = 2'-O-methylguanosine-3'-phosphate
  modified_base 16: mod_base = OTHER; note = 2'-deoxy-2'-fluoroadenosine-3'-phosphate
  modified_base 17: mod_base = OTHER; note = 2'-O-methylguanosine-3'-phosphate
  modified_base 18: mod_base = OTHER; note = 2'-O-methyluridine-3'-phosphate
  modified_base 19: mod_base = OTHER; note = 2'-O-methyluridine-3'-phosphate
  modified_base 20: mod_base = OTHER; note = 2'-O-methyluridine-3'-phosphate
  modified_base 21: mod_base = OTHER; note = 2'-O-methylcytidine-3'-phosphorothioate
  modified_base 22: mod_base = OTHER; note = 2'-O-methyluridine-3'-phosphorothioate
  modified_base 23: mod_base = OTHER; note = 2'-O-methylguanosine
taaagcactttattgagtttctg

SEQ ID NO: 47 - RNA, 23 nt, synthetic construct
  source 1..23: mol_type = other RNA
  modified_base 1: mod_base = OTHER; note = 2'-O-methyluridine-3'-phosphate 5'-(E)-Vinylphosphonate
  modified_base 2: mod_base = OTHER; note = 2'-deoxy-2'-fluorocytidine-3'-phosphate
  modified_base 3: mod_base = OTHER; note = 2'-O-methylguanosine-3'-phosphate
  modified_base 4: mod_base = OTHER; note = 2'-O-methyluridine-3'-phosphate
  modified_base 5: mod_base = OTHER; note = 2'-O-methyluridine-3'-phosphate
  modified_base 6: mod_base = OTHER; note = 2'-deoxy-2'-fluorouridine-3'-phosphate
  modified_base 7: mod_base = OTHER; note = 2'-O-methyluridine-3'-phosphate
  modified_base 8: mod_base = OTHER; note = 2'-O-methylcytidine-3'-phosphate
  modified_base 9: mod_base = OTHER; note = 2'-O-methyladenosine-3'-phosphate
  modified_base 10: mod_base = OTHER; note = 2'-O-methyladenosine-3'-phosphate
  modified_base 11: mod_base = OTHER; note = 2'-O-methyladenosine-3'-phosphate
  modified_base 12: mod_base = OTHER; note = 2'-O-methylguanosine-3'-phosphate
  modified_base 13: mod_base = OTHER; note = 2'-O-methylcytidine-3'-phosphate
  modified_base 14: mod_base = OTHER; note = 2'-deoxy-2'-fluoroadenosine-3'-phosphate
  modified_base 15: mod_base = OTHER; note = 2'-O-methylcytidine-3'-phosphate
  modified_base 16: mod_base = OTHER; note = 2'-deoxy-2'-fluorouridine-3'-phosphate
  modified_base 17: mod_base = OTHER; note = 2'-O-methyluridine-3'-phosphate
  modified_base 18: mod_base = OTHER; note = 2'-O-methyluridine-3'-phosphate
  modified_base 19: mod_base = OTHER; note = 2'-O-methyladenosine-3'-phosphate
  modified_base 20: mod_base = OTHER; note = 2'-O-methyluridine-3'-phosphate
  modified_base 21: mod_base = OTHER; note = 2'-O-methyluridine-3'-phosphorothioate
  modified_base 22: mod_base = OTHER; note = 2'-O-methylguanosine-3'-phosphorothioate
  modified_base 23: mod_base = OTHER; note = 2'-O-methyladenosine
tcgttttcaaagcactttattga

SEQ ID NO: 48 - RNA, 23 nt, synthetic construct
  source 1..23: mol_type = other RNA
  modified_base 1: mod_base = OTHER; note = 2'-O-methyluridine-3'-phosphorothioate 5'-(E)-Vinylphosphonate
  modified_base 2: mod_base = OTHER; note = 2'-deoxy-2'-fluoroadenosine-3'-phosphorothioate
  modified_base 3: mod_base = OTHER; note = 2'-O-methyluridine-3'-phosphate
  modified_base 4: mod_base = OTHER; note = 2'-O-methyluridine-3'-phosphate
  modified_base 5: mod_base = OTHER; note = 2'-O-methylguanosine-3'-phosphate
  modified_base 6: mod_base = OTHER; note = 2'-deoxy-2'-fluoroadenosine-3'-phosphate
  modified_base 7: mod_base = OTHER; note = 2'-O-methylcytidine-3'-phosphate
  modified_base 8: mod_base = OTHER; note = 2'-deoxy-2'-fluorocytidine-3'-phosphate
  modified_base 9: mod_base = OTHER; note = 2'-deoxy-2'-fluorocytidine-3'-phosphate
  modified_base 10: mod_base = OTHER; note = 2'-O-methyladenosine-3'-phosphate
  modified_base 11: mod_base = OTHER; note = 2'-O-methyladenosine-3'-phosphate
  modified_base 12: mod_base = OTHER; note = 2'-O-methyladenosine-3'-phosphate
  modified_base 13: mod_base = OTHER; note = 2'-O-methyladenosine-3'-phosphate
  modified_base 14: mod_base = OTHER; note = 2'-deoxy-2'-fluorouridine-3'-phosphate
  modified_base 15: mod_base = OTHER; note = 2'-O-methyluridine-3'-phosphate
  modified_base 16: mod_base = OTHER; note = 2'-deoxy-2'-fluorocytidine-3'-phosphate
  modified_base 17: mod_base = OTHER; note = 2'-O-methyladenosine-3'-phosphate
  modified_base 18: mod_base = OTHER; note = 2'-O-methyladenosine-3'-phosphate
  modified_base 19: mod_base = OTHER; note = 2'-O-methylcytidine-3'-phosphate
  modified_base 20: mod_base = OTHER; note = 2'-O-methyladenosine-3'-phosphate
  modified_base 21: mod_base = OTHER; note = 2'-O-methyladenosine-3'-phosphorothioate
  modified_base 22: mod_base = OTHER; note = 2'-O-methyluridine-3'-phosphorothioate
  modified_base 23: mod_base = OTHER; note = 2'-O-methylguanosine
tattgacccaaaattcaacaatg

SEQ ID NO: 49 - RNA, 12 nt, synthetic construct
  source 1..12: mol_type = other RNA
tacagtctatgt

SEQ ID NO: 50 - RNA, 12 nt, synthetic construct
  source 1..12: mol_type = other RNA
acatagactgta

SEQ ID NO: 51 - RNA, 12 nt, synthetic construct
  source 1..12: mol_type = other RNA
  modified_base 6: mod_base = OTHER; note = 1-deoxy-1-(thymin-1-yl)-alpha-L-threofuranose 2-phosphate
tacagtctatgt

SEQ ID NO: 52 - RNA, 12 nt, synthetic construct
  source 1..12: mol_type = other RNA
acatagactgta

SEQ ID NO: 53 - DNA, 12 bp, synthetic construct
  source 1..12: mol_type = other DNA
tacagtctatgt

SEQ ID NO: 54 - DNA, 12 bp, synthetic construct
  source 1..12: mol_type = other DNA
acatagactgta

SEQ ID NO: 55 - DNA, 12 bp, synthetic construct
  source 1..12: mol_type = other DNA
  modified_base 6: mod_base = OTHER; note = 1-deoxy-1-(thymin-1-yl)-alpha-L-threofuranose 2-phosphate
  misc_feature 6: note = RNA
  misc_feature 1..5: note = DNA
tacagtctatgt

SEQ ID NO: 56 - DNA, 12 bp, synthetic construct
  source 1..12: mol_type = other DNA
acatagactgta

SEQ ID NO: 57 - RNA, 12 nt, synthetic construct
  source 1..12: mol_type = other RNA
tacagtctatgt

SEQ ID NO: 58 - RNA, 12 nt, synthetic construct
  source 1..12: mol_type = other RNA
acatagactgta

SEQ ID NO: 59 - RNA, 12 nt, synthetic construct
  source 1..12: mol_type = other RNA
  modified_base 7: mod_base = OTHER; note 1-deoxy-1-(5-methylcytosin-1-yl)-alpha-L-threofuranose 2-phosphate
tacagtctatgt

SEQ ID NO: 60 - RNA, 12 nt, synthetic construct
  source 1..12: mol_type = other RNA
acatagactgta

SEQ ID NO: 61 - DNA, 12 bp, synthetic construct
  source 1..12: mol_type = other DNA
tacagcctatgt

SEQ ID NO: 62 - DNA, 12 bp, synthetic construct
  source 1..12: mol_type = other DNA
acataggctgta

SEQ ID NO: 63 - DNA, 12 bp, synthetic construct
  source 1..12: mol_type = other DNA
  modified_base 6: mod_base = OTHER; note 1-deoxy-1-(5-methylcytosin-1-yl)-alpha-L-threofuranose 2-phosphate
  misc_feature 6: note = RNA
  misc_feature 1..5: note = DNA
tacagcctatgt

SEQ ID NO: 64 - DNA, 12 bp, synthetic construct
  source 1..12: mol_type = other DNA
acataggctgta

SEQ ID NO: 65 - DNA, 20 bp, synthetic construct
  source 1..20: mol_type = other DNA
  modified_base 1: mod_base = OTHER; note = 2'-deoxythymidine-3'-phosphorothioate
tttttttttttttttttttt

SEQ ID NO: 66 - DNA, 20 bp, synthetic construct
  source 1..20: mol_type = other DNA
  modified_base 1: mod_base = OTHER; note = guanosine-3'-phosphate
  misc_feature 1: note = RNA
  misc_feature 2..20: note = DNA
gttttttttttttttttttt

SEQ ID NO: 67 - DNA, 20 bp, synthetic construct
  source 1..20: mol_type = other DNA
  modified_base 1: mod_base = OTHER; note = 5'-(S)-methyl- guanosine 3'-phosphate
  misc_feature 1: note = RNA
  misc_feature 2..20: note = DNA
gttttttttttttttttttt

SEQ ID NO: 68 - DNA, 20 bp, synthetic construct
  source 1..20: mol_type = other DNA
  modified_base 1: mod_base = OTHER; note = 5'-(R)-methyl- guanosine 3'-phosphate
  misc_feature 1: note = RNA
  misc_feature 2..20: note = DNA
gttttttttttttttttttt

SEQ ID NO: 69 - DNA, 20 bp, synthetic construct
  source 1..20: mol_type = other DNA
  modified_base 1: mod_base = OTHER; note = guanosine-3'-phosphorothioate
  misc_feature 1: note = RNA
  misc_feature 2..20: note = DNA
gttttttttttttttttttt

SEQ ID NO: 70 - DNA, 20 bp, synthetic construct
  source 1..20: mol_type = other DNA
  modified_base 1: mod_base = OTHER; note = 5'-(R)-methyl- guanosine 3'-phosphorothioate
  misc_feature 1: note = RNA
  misc_feature 2..20: note = DNA
gttttttttttttttttttt

SEQ ID NO: 71 - DNA, 20 bp, synthetic construct
  source 1..20: mol_type = other DNA
  modified_base 1: mod_base = OTHER; note = 5'-(S)-methyl- guanosine 3'-phosphorothioate
  misc_feature 1: note = RNA
  misc_feature 2..20: note = DNA
gttttttttttttttttttt

SEQ ID NO: 72 - DNA, 20 bp, synthetic construct
  source 1..20: mol_type = other DNA
  modified_base 19: mod_base = OTHER; note = 2'-deoxythymidine-3'-phosphorothioate
tttttttttttttttttttt

SEQ ID NO: 73 - DNA, 20 bp, synthetic construct
  source 1..20: mol_type = other DNA
  modified_base 20: mod_base = OTHER; note = guanosine
  misc_feature 20: note = RNA
  misc_feature 1..19: note = DNA
tttttttttttttttttttg

SEQ ID NO: 74 - DNA, 20 bp, synthetic construct
  source 1..20: mol_type = other DNA
  modified_base 20: mod_base = OTHER; note = 5'-(R)-methyl- guanosine
  misc_feature 20: note = RNA
  misc_feature 1..19: note = DNA
tttttttttttttttttttg

SEQ ID NO: 75 - DNA, 20 bp, synthetic construct
  source 1..20: mol_type = other DNA
  modified_base 20: mod_base = OTHER; note = 5'-(S)-methyl- guanosine
  misc_feature 20: note = RNA
  misc_feature 1..19: note = DNA
tttttttttttttttttttg

SEQ ID NO: 76 - DNA, 20 bp, synthetic construct
  source 1..20: mol_type = other DNA
  modified_base 19: mod_base = OTHER; note = 2'-deoxythymidine-3'-phosphorothioate
  modified_base 20: mod_base = OTHER; note = guanosine
  misc_feature 20: note = RNA
  misc_feature 1..19: note = DNA
tttttttttttttttttttg

SEQ ID NO: 77 - DNA, 20 bp, synthetic construct
  source 1..20: mol_type = other DNA
  modified_base 19: mod_base = OTHER; note = 2'-deoxythymidine-3'-phosphorothioate
  modified_base 20: mod_base = OTHER; note = 5'-(S)-methyl- guanosine
  misc_feature 20: note = RNA
  misc_feature 1..19: note = DNA
tttttttttttttttttttg

SEQ ID NO: 78 - DNA, 20 bp, synthetic construct
  source 1..20: mol_type = other DNA
  modified_base 19: mod_base = OTHER; note = 2'-deoxythymidine-3'-phosphorothioate
  modified_base 20: mod_base = OTHER; note = 5'-(R)-methyl- guanosine
  misc_feature 20: note = RNA
  misc_feature 1..19: note = DNA
tttttttttttttttttttg

SEQ ID NO: 79 - DNA, 20 bp, synthetic construct
  source 1..20: mol_type = other DNA
  modified_base 19: mod_base = OTHER; note = guanosine-3'-phosphate
  modified_base 20: mod_base = OTHER; note = guanosine
  misc_feature 19..20: note = RNA
  misc_feature 1..18: note = DNA
ttttttttttttttttttgg

SEQ ID NO: 80 - DNA, 20 bp, synthetic construct
  source 1..20: mol_type = other DNA
  modified_base 19: mod_base = OTHER; note = 5'-(R)-methyl- guanosine 3'-phosphate
  modified_base 20: mod_base = OTHER; note = 5'-(R)-methyl- guanosine
  misc_feature 19..20: note = RNA
  misc_feature 1..18: note = DNA
ttttttttttttttttttgg

SEQ ID NO: 81 - DNA, 20 bp, synthetic construct
  source 1..20: mol_type = other DNA
  modified_base 19: mod_base = OTHER; note = 5'-(S)-methyl- guanosine 3'-phosphate
  modified_base 20: mod_base = OTHER; note = 5'-(S)-methyl- guanosine
  misc_feature 19..20: note = RNA
  misc_feature 1..18: note = DNA
ttttttttttttttttttgg

SEQ ID NO: 82 - DNA, 20 bp, synthetic construct
  source 1..20: mol_type = other DNA
  modified_base 19: mod_base = OTHER; note = guanosine-3'-phosphorothioate
  modified_base 20: mod_base = OTHER; note = guanosine
  misc_feature 19..20: note = RNA
  misc_feature 1..18: note = DNA
ttttttttttttttttttgg

SEQ ID NO: 83 - DNA, 20 bp, synthetic construct
  source 1..20: mol_type = other DNA
  modified_base 19: mod_base = OTHER; note = 5'-(S)-methyl- guanosine 3'-phosphorothioate
  modified_base 20: mod_base = OTHER; note = 5'-(S)-methyl- guanosine
  misc_feature 19..20: note = RNA
  misc_feature 1..18: note = DNA
ttttttttttttttttttgg

SEQ ID NO: 84 - DNA, 20 bp, synthetic construct
  source 1..20: mol_type = other DNA
  modified_base 19: mod_base = OTHER; note = 5'-(R)-methyl- guanosine 3'-phosphorothioate
  modified_base 20: mod_base = OTHER; note = 5'-(R)-methyl- guanosine
  misc_feature 19..20: note = RNA
  misc_feature 1..18: note = DNA
ttttttttttttttttttgg

SEQ ID NO: 85 - RNA, 12 nt, synthetic construct
  source 1..12: mol_type = other RNA
tacagtctatgt

SEQ ID NO: 86 - DNA, 12 bp, synthetic construct
  source 1..12: mol_type = other DNA
tacagtctatgt

SEQ ID NO: 87 - DNA, 12 bp, synthetic construct
  source 1..12: mol_type = other DNA
  modified_base 6: mod_base = OTHER; note 2-(1R-(uracil-1-yl)-2-hydroxyethoxy)-1,3-dihydroxypropane 3-phosphate
  misc_feature 6: note = RNA
  misc_feature 1..5: note = DNA
tacagtctatgt

SEQ ID NO: 88 - RNA, 12 nt, synthetic construct
  source 1..12: mol_type = other RNA
  modified_base 6: mod_base = OTHER; note 2-(1R-(uracil-1-yl)-2-hydroxyethoxy)-1,3-dihydroxypropane 3-phosphate
tacagtctatgt

SEQ ID NO: 89 - RNA, 12 nt, synthetic construct
  source 1..12: mol_type = other RNA
  modified_base 6: mod_base = OTHER; note 2-(1R-(uracil-1-yl)-2-hydroxyethoxy)-1,3-(2S,3S)-dihydroxyb utane 1-phosphate
tacagtctatgt

SEQ ID NO: 90 - DNA, 12 bp, synthetic construct
  source 1..12: mol_type = other DNA
  modified_base 6: mod_base = OTHER; note 2-(1R-(uracil-1-yl)-2-hydroxyethoxy)-1,3-(2S,3S)-dihydroxyb utane 1-phosphate
  misc_feature 6: note = RNA
  misc_feature 1..5: note = DNA
tacagtctatgt

SEQ ID NO: 91 - RNA, 12 nt, synthetic construct
  source 1..12: mol_type = other RNA
  modified_base 6: mod_base = OTHER; note 2-(1R-(uracil-1-yl)-2S-hydroxypropoxy)-1,3-dihydroxybutane 1-phosphate
tacagtctatgt

SEQ ID NO: 92 - DNA, 12 bp, synthetic construct
  source 1..12: mol_type = other DNA
  modified_base 6: mod_base = OTHER; note 2-(1R-(uracil-1-yl)-2S-hydroxypropoxy)-1,3-dihydroxybutane 1-phosphate
  misc_feature 6: note = RNA
  misc_feature 1..5: note = DNA
tacagtctatgt

SEQ ID NO: 93 - RNA, 12 nt, synthetic construct
  source 1..12: mol_type = other RNA
  modified_base 6: mod_base = OTHER; note 2-(1R-(uracil-1-yl)-2-hydroxyethoxy)-1,3-(2S,3R)-dihydroxyb utane 1-phosphate
tacagtctatgt

SEQ ID NO: 94 - DNA, 12 bp, synthetic construct
  source 1..12: mol_type = other DNA
  modified_base 6: mod_base = OTHER; note 2-(1R-(uracil-1-yl)-2-hydroxyethoxy)-1,3-(2S,3R)-dihydroxyb utane 1-phosphate
  misc_feature 6: note = RNA
  misc_feature 1..5: note = DNA
tacagtctatgt

SEQ ID NO: 95 - RNA, 12 nt, synthetic construct
  source 1..12: mol_type = other RNA
  modified_base 6: mod_base = OTHER; note 2-(1R-(uracil-1-yl)-2R-hydroxypropoxy)-1,3-dihydroxybutane 1-phosphate
tacagtctatgt

SEQ ID NO: 96 - DNA, 12 bp, synthetic construct
  source 1..12: mol_type = other DNA
  modified_base 6: mod_base = OTHER; note 2-(1R-(uracil-1-yl)-2R-hydroxypropoxy)-1,3-dihydroxybutane 1-phosphate
  misc_feature 6: note = RNA
  misc_feature 1..5: note = DNA
tacagtctatgt

SEQ ID NO: 97 - RNA, 12 nt, synthetic construct
  source 1..12: mol_type = other RNA
  modified_base 6: mod_base = OTHER; note 2-(1R-(uracil-1-yl)-2-hydroxyethoxy)-(2R,3S)-1,3-dihydroxyb utane 3-phosphate
tacagtctatgt

SEQ ID NO: 98 - DNA, 12 bp, synthetic construct
  source 1..12: mol_type = other DNA
  modified_base 6: mod_base = OTHER; note 2-(1R-(uracil-1-yl)-2-hydroxyethoxy)-(2R,3S)-1,3-dihydroxyb utane 3-phosphate
  misc_feature 6: note = RNA
  misc_feature 1..5: note = DNA
tacagtctatgt

SEQ ID NO: 99 - RNA, 12 nt, synthetic construct
  source 1..12: mol_type = other RNA
  modified_base 6: mod_base = OTHER; note 2-(1R-(uracil-1-yl)-2-hydroxyethoxy)-(2R,3R)-1,3-dihydroxyb utane 3-phosphate
tacagtctatgt

SEQ ID NO: 100 - DNA, 12 bp, synthetic construct
  source 1..12: mol_type = other DNA
  modified_base 6: mod_base = OTHER; note 2-(1R-(uracil-1-yl)-2-hydroxyethoxy)-(2R,3R)-1,3-dihydroxyb utane 3-phosphate
  misc_feature 6: note = RNA
  misc_feature 1..5: note = DNA
tacagtctatgt

SEQ ID NO: 101 - RNA, 12 nt, synthetic construct
  source 1..12: mol_type = other RNA
  modified_base 6: mod_base = OTHER; note 2-(1R-(uracil-1-yl)-2-hydroxyethoxy)-1,3-dihydroxy-2-methox ypropane 1-phosphate
tacagtctatgt

SEQ ID NO: 102 - DNA, 12 bp, synthetic construct
  source 1..12: mol_type = other DNA
  modified_base 6: mod_base = OTHER; note 2-(1R-(uracil-1-yl)-2-hydroxyethoxy)-1,3-dihydroxy-2-methox ypropane 1-phosphate
  misc_feature 6: note = RNA
  misc_feature 1..5: note = DNA
tacagtctatgt

SEQ ID NO: 103 - RNA, 12 nt, synthetic construct
  source 1..12: mol_type = other RNA
  modified_base 6: mod_base = OTHER; note 2-(1S-(uracil-1-yl)-2-hydroxyethoxy)-(2S,3R)-1,3-dihydroxyb utane 3-phosphate
tacagtctatgt

SEQ ID NO: 104 - DNA, 12 bp, synthetic construct
  source 1..12: mol_type = other DNA
  modified_base 6: mod_base = OTHER; note 2-(1S-(uracil-1-yl)-2-hydroxyethoxy)-(2S,3R)-1,3-dihydroxyb utane 3-phosphate
  misc_feature 6: note = RNA
  misc_feature 1..5: note = DNA
tacagtctatgt

SEQ ID NO: 105 - DNA, 20 bp, synthetic construct
  source 1..20: mol_type = other DNA
  modified_base 1: mod_base = OTHER; note 2-(1R-(uracil-1-yl)-2-hydroxyethoxy)-1,3-(2S,3S)-dihydroxyb utane 1-phosphate
  misc_feature 1: note = RNA
  misc_feature 2..20: note = DNA
tttttttttttttttttttt

SEQ ID NO: 106 - DNA, 20 bp, synthetic construct
  source 1..20: mol_type = other DNA
  modified_base 1: mod_base = OTHER; note 2-(1R-(uracil-1-yl)-2-hydroxyethoxy)-1,3-(2S,3S)-dihydroxyb utane 1-phosphorothioate
  misc_feature 1: note = RNA
  misc_feature 2..20: note = DNA
tttttttttttttttttttt

SEQ ID NO: 107 - DNA, 20 bp, synthetic construct
  source 1..20: mol_type = other DNA
  modified_base 1: mod_base = OTHER; note 2-(1R-(uracil-1-yl)-2S-hydroxypropoxy)-1,3-dihydroxybutane 1-phosphate
  misc_feature 1: note = RNA
  misc_feature 2..20: note = DNA
tttttttttttttttttttt

SEQ ID NO: 108 - DNA, 20 bp, synthetic construct
  source 1..20: mol_type = other DNA
  modified_base 1: mod_base = OTHER; note 2-(1R-(uracil-1-yl)-2S-hydroxypropoxy)-1,3-dihydroxybutane 1-phosphorothioate
  misc_feature 1: note = RNA
  misc_feature 2..20: note = DNA
tttttttttttttttttttt

SEQ ID NO: 109 - DNA, 20 bp, synthetic construct
  source 1..20: mol_type = other DNA
  modified_base 1: mod_base = OTHER; note 2-(1R-(uracil-1-yl)-2-hydroxyethoxy)-1,3-(2S,3R)-dihydroxyb utane 1-phosphate
  misc_feature 1: note = RNA
  misc_feature 2..20: note = DNA
tttttttttttttttttttt

SEQ ID NO: 110 - DNA, 20 bp, synthetic construct
  source 1..20: mol_type = other DNA
  modified_base 1: mod_base = OTHER; note 2-(1R-(uracil-1-yl)-2-hydroxyethoxy)-1,3-(2S,3R)-dihydroxyb utane 1-phosphorothioate
  misc_feature 1: note = RNA
  misc_feature 2..20: note = DNA
tttttttttttttttttttt

SEQ ID NO: 111 - DNA, 20 bp, synthetic construct
  source 1..20: mol_type = other DNA
  modified_base 1: mod_base = OTHER; note 2-(1R-(uracil-1-yl)-2R-hydroxypropoxy)-1,3-dihydroxybutane 1-phosphate
  misc_feature 1: note = RNA
  misc_feature 2..20: note = DNA
tttttttttttttttttttt

SEQ ID NO: 112 - DNA, 20 bp, synthetic construct
  source 1..20: mol_type = other DNA
  modified_base 1: mod_base = OTHER; note 2-(1R-(uracil-1-yl)-2R-hydroxypropoxy)-1,3-dihydroxybutane 1-phosphorothioate
  misc_feature 1: note = RNA
  misc_feature 2..20: note = DNA
tttttttttttttttttttt

SEQ ID NO: 113 - DNA, 20 bp, synthetic construct
  source 1..20: mol_type = other DNA
  modified_base 1: mod_base = OTHER; note 2-(1R-(uracil-1-yl)-2-hydroxyethoxy)-(2R,3S)-1,3-dihydroxyb utane 3-phosphate
  misc_feature 1: note = RNA
  misc_feature 2..20: note = DNA
tttttttttttttttttttt

SEQ ID NO: 114 - DNA, 20 bp, synthetic construct
  source 1..20: mol_type = other DNA
  modified_base 1: mod_base = OTHER; note 2-(1R-(uracil-1-yl)-2-hydroxyethoxy)-(2R,3S)-1,3-dihydroxyb utane 3-phosphorothioate
  misc_feature 1: note = RNA
  misc_feature 2..20: note = DNA
tttttttttttttttttttt

SEQ ID NO: 115 - DNA, 20 bp, synthetic construct
  source 1..20: mol_type = other DNA
  modified_base 1: mod_base = OTHER; note 2-(1R-(uracil-1-yl)-2-hydroxyethoxy)-(2R,3R)-1,3-dihydroxyb utane 3-phosphate
  misc_feature 1: note = RNA
  misc_feature 2..20: note = DNA
tttttttttttttttttttt

SEQ ID NO: 116 - DNA, 20 bp, synthetic construct
  source 1..20: mol_type = other DNA
  modified_base 1: mod_base = OTHER; note 2-(1R-(uracil-1-yl)-2-hydroxyethoxy)-(2R,3R)-1,3-dihydroxyb utane 3-phosphorothioate
  misc_feature 1: note = RNA
  misc_feature 2..20: note = DNA
tttttttttttttttttttt

SEQ ID NO: 117 - DNA, 20 bp, synthetic construct
  source 1..20: mol_type = other DNA
  modified_base 1: mod_base = OTHER; note 2-(1R-(uracil-1-yl)-2-hydroxyethoxy)-1,3-dihydroxy-2-methox ypropane 1-phosphate
  misc_feature 1: note = RNA
  misc_feature 2..20: note = DNA
tttttttttttttttttttt

SEQ ID NO: 118 - DNA, 20 bp, synthetic construct
  source 1..20: mol_type = other DNA
  modified_base 1: mod_base = OTHER; note 2-(1R-(uracil-1-yl)-2-hydroxyethoxy)-1,3-dihydroxy-2-methox ypropane 1-phosphorothioate
  misc_feature 1: note = RNA
  misc_feature 2..20: note = DNA
tttttttttttttttttttt

SEQ ID NO: 119 - DNA, 20 bp, synthetic construct
  source 1..20: mol_type = other DNA
  modified_base 1: mod_base = OTHER; note 2-(1S-(uracil-1-yl)-2-hydroxyethoxy)-(2S,3R)-1,3-dihydroxyb utane 3-phosphate
  misc_feature 1: note = RNA
  misc_feature 2..20: note = DNA
tttttttttttttttttttt

SEQ ID NO: 120 - DNA, 20 bp, synthetic construct
  source 1..20: mol_type = other DNA
  modified_base 1: mod_base = OTHER; note 2-(1S-(uracil-1-yl)-2-hydroxyethoxy)-(2S,3R)-1,3-dihydroxyb utane 3-phosphorothioate
  misc_feature 1: note = RNA
  misc_feature 2..20: note = DNA
tttttttttttttttttttt

SEQ ID NO: 121 - DNA, 20 bp, synthetic construct
  source 1..20: mol_type = other DNA
  modified_base 1: mod_base = OTHER; note 2-(1R-(uracil-1-yl)-2-hydroxyethoxy)-1,3-dihydroxypropane 3-phosphate
  misc_feature 1: note = RNA
  misc_feature 2..20: note = DNA
tttttttttttttttttttt

SEQ ID NO: 122 - DNA, 20 bp, synthetic construct
  source 1..20: mol_type = other DNA
  modified_base 1: mod_base = OTHER; note 2-(1R-(uracil-1-yl)-2-hydroxyethoxy)-1,3-dihydroxypropane 3-phosphorothioate
  misc_feature 1: note = RNA
  misc_feature 2..20: note = DNA
tttttttttttttttttttt

SEQ ID NO: 123 - DNA, 20 bp, synthetic construct
  source 1..20: mol_type = other DNA
  modified_base 20: mod_base = OTHER; note 2-(1R-(uracil-1-yl)-2-hydroxyethoxy)-1,3-(2S,3S)-dihydroxyb utane
  misc_feature 20: note = RNA
  misc_feature 1..19: note = DNA
tttttttttttttttttttt

SEQ ID NO: 124 - DNA, 20 bp, synthetic construct
  source 1..20: mol_type = other DNA
  modified_base 19: mod_base = OTHER; note = 2'-deoxythymidine-3'-phosphorothioate
  modified_base 20: mod_base = OTHER; note 2-(1R-(uracil-1-yl)-2-hydroxyethoxy)-1,3-(2S,3S)-dihydroxyb utane
  misc_feature 20: note = RNA
  misc_feature 1..19: note = DNA
tttttttttttttttttttt

SEQ ID NO: 125 - DNA, 20 bp, synthetic construct
  source 1..20: mol_type = other DNA
  modified_base 19: mod_base = OTHER; note 2-(1R-(uracil-1-yl)-2-hydroxyethoxy)-1,3-(2S,3S)-dihydroxyb utane 1-phosphate
  modified_base 20: mod_base = OTHER; note 2-(1R-(uracil-1-yl)-2-hydroxyethoxy)-1,3-(2S,3S)-dihydroxyb utane
  misc_feature 19..20: note = RNA
  misc_feature 1..18: note = DNA
tttttttttttttttttttt

SEQ ID NO: 126 - DNA, 20 bp, synthetic construct
  source 1..20: mol_type = other DNA
  modified_base 19: mod_base = OTHER; note 2-(1R-(uracil-1-yl)-2-hydroxyethoxy)-1,3-(2S,3S)-dihydroxyb utane 1-phosphorothioate
  modified_base 20: mod_base = OTHER; note 2-(1R-(uracil-1-yl)-2-hydroxyethoxy)-1,3-(2S,3S)-dihydroxyb utane
  misc_feature 19..20: note = RNA
  misc_feature 1..18: note = DNA
tttttttttttttttttttt

SEQ ID NO: 127 - DNA, 20 bp, synthetic construct
  source 1..20: mol_type = other DNA
  modified_base 19: mod_base = OTHER; note 2-(1R-(uracil-1-yl)-2-hydroxyethoxy)-1,3-(2S,3S)-dihydroxyb utane 1-phosphate
  misc_feature 19: note = RNA
  misc_feature 1..18: note = DNA
tttttttttttttttttttt

SEQ ID NO: 128 - DNA, 20 bp, synthetic construct
  source 1..20: mol_type = other DNA
  modified_base 19: mod_base = OTHER; note 2-(1R-(uracil-1-yl)-2-hydroxyethoxy)-1,3-(2S,3S)-dihydroxyb utane 1-phosphorothioate
  misc_feature 19: note = RNA
  misc_feature 1..18: note = DNA
tttttttttttttttttttt

SEQ ID NO: 129 - DNA, 20 bp, synthetic construct
  source 1..20: mol_type = other DNA
  modified_base 20: mod_base = OTHER; note 2-(1R-(uracil-1-yl)-2S-hydroxypropoxy)-1,3-dihydroxybutane
  misc_feature 20: note = RNA
  misc_feature 1..19: note = DNA
tttttttttttttttttttt

SEQ ID NO: 130 - DNA, 20 bp, synthetic construct
  source 1..20: mol_type = other DNA
  modified_base 19: mod_base = OTHER; note = 2'-deoxythymidine-3'-phosphorothioate
  modified_base 20: mod_base = OTHER; note 2-(1R-(uracil-1-yl)-2S-hydroxypropoxy)-1,3-dihydroxybutane
  misc_feature 20: note = RNA
  misc_feature 1..19: note = DNA
tttttttttttttttttttt

SEQ ID NO: 131 - DNA, 20 bp, synthetic construct
  source 1..20: mol_type = other DNA
  modified_base 19: mod_base = OTHER; note 2-(1R-(uracil-1-yl)-2S-hydroxypropoxy)-1,3-dihydroxybutane 1-phosphate
  modified_base 20: mod_base = OTHER; note 2-(1R-(uracil-1-yl)-2S-hydroxypropoxy)-1,3-dihydroxybutane
  misc_feature 19..20: note = RNA
  misc_feature 1..18: note = DNA
tttttttttttttttttttt

SEQ ID NO: 132 - DNA, 20 bp, synthetic construct
  source 1..20: mol_type = other DNA
  modified_base 19: mod_base = OTHER; note 2-(1R-(uracil-1-yl)-2S-hydroxypropoxy)-1,3-dihydroxybutane 1-phosphorothioate
  modified_base 20: mod_base = OTHER; note 2-(1R-(uracil-1-yl)-2S-hydroxypropoxy)-1,3-dihydroxybutane
  misc_feature 19..20: note = RNA
  misc_feature 1..18: note = DNA
tttttttttttttttttttt

SEQ ID NO: 133 - DNA, 20 bp, synthetic construct
  source 1..20: mol_type = other DNA
  modified_base 19: mod_base = OTHER; note 2-(1R-(uracil-1-yl)-2S-hydroxypropoxy)-1,3-dihydroxybutane 1-phosphate
  misc_feature 19: note = RNA
  misc_feature 1..18: note = DNA
tttttttttttttttttttt

SEQ ID NO: 134 - DNA, 20 bp, synthetic construct
  source 1..20: mol_type = other DNA
  modified_base 19: mod_base = OTHER; note 2-(1R-(uracil-1-yl)-2S-hydroxypropoxy)-1,3-dihydroxybutane 1-phosphorothioate
  misc_feature 19: note = RNA
  misc_feature 1..18: note = DNA
tttttttttttttttttttt

SEQ ID NO: 135 - DNA, 20 bp, synthetic construct
  source 1..20: mol_type = other DNA
  modified_base 20: mod_base = OTHER; note 2-(1R-(uracil-1-yl)-2-hydroxyethoxy)-1,3-(2S,3R)-dihydroxyb utane
  misc_feature 20: note = RNA
  misc_feature 1..19: note = DNA
tttttttttttttttttttt

SEQ ID NO: 136 - DNA, 20 bp, synthetic construct
  source 1..20: mol_type = other DNA
  modified_base 19: mod_base = OTHER; note = 2'-deoxythymidine-3'-phosphorothioate
  modified_base 20: mod_base = OTHER; note 2-(1R-(uracil-1-yl)-2-hydroxyethoxy)-1,3-(2S,3R)-dihydroxyb utane
  misc_feature 20: note = RNA
  misc_feature 1..19: note = DNA
tttttttttttttttttttt

SEQ ID NO: 137 - DNA, 20 bp, synthetic construct
  source 1..20: mol_type = other DNA
  modified_base 19: mod_base = OTHER; note 2-(1R-(uracil-1-yl)-2-hydroxyethoxy)-1,3-(2S,3R)-dihydroxyb utane 1-phosphate
  modified_base 20: mod_base = OTHER; note 2-(1R-(uracil-1-yl)-2-hydroxyethoxy)-1,3-(2S,3R)-dihydroxyb utane
  misc_feature 19..20: note = RNA
  misc_feature 1..18: note = DNA
tttttttttttttttttttt

SEQ ID NO: 138 - DNA, 20 bp, synthetic construct
  source 1..20: mol_type = other DNA
  modified_base 19: mod_base = OTHER; note 2-(1R-(uracil-1-yl)-2-hydroxyethoxy)-1,3-(2S,3R)-dihydroxyb utane 1-phosphorothioate
  modified_base 20: mod_base = OTHER; note 2-(1R-(uracil-1-yl)-2-hydroxyethoxy)-1,3-(2S,3R)-dihydroxyb utane
  misc_feature 19..20: note = RNA
  misc_feature 1..18: note = DNA
tttttttttttttttttttt

SEQ ID NO: 139 - DNA, 20 bp, synthetic construct
  source 1..20: mol_type = other DNA
  modified_base 19: mod_base = OTHER; note 2-(1R-(uracil-1-yl)-2-hydroxyethoxy)-1,3-(2S,3R)-dihydroxyb utane 1-phosphate
  misc_feature 19: note = RNA
  misc_feature 1..18: note = DNA
tttttttttttttttttttt

SEQ ID NO: 140 - DNA, 20 bp, synthetic construct
  source 1..20: mol_type = other DNA
  modified_base 19: mod_base = OTHER; note 2-(1R-(uracil-1-yl)-2-hydroxyethoxy)-1,3-(2S,3R)-dihydroxyb utane 1-phosphorothioate
  misc_feature 19: note = RNA
  misc_feature 1..18: note = DNA
tttttttttttttttttttt

SEQ ID NO: 141 - DNA, 20 bp, synthetic construct
  source 1..20: mol_type = other DNA
  modified_base 20: mod_base = OTHER; note 2-(1R-(uracil-1-yl)-2R-hydroxypropoxy)-1,3-dihydroxybutane
  misc_feature 20: note = RNA
  misc_feature 1..19: note = DNA
tttttttttttttttttttt

SEQ ID NO: 142 - DNA, 20 bp, synthetic construct
  source 1..20: mol_type = other DNA
  modified_base 19: mod_base = OTHER; note = 2'-deoxythymidine-3'-phosphorothioate
  modified_base 20: mod_base = OTHER; note 2-(1R-(uracil-1-yl)-2R-hydroxypropoxy)-1,3-dihydroxybutane
  misc_feature 20: note = RNA
  misc_feature 1..19: note = DNA
tttttttttttttttttttt

SEQ ID NO: 143 - DNA, 20 bp, synthetic construct
  source 1..20: mol_type = other DNA
  modified_base 19: mod_base = OTHER; note 2-(1R-(uracil-1-yl)-2R-hydroxypropoxy)-1,3-dihydroxybutane 1-phosphate
  modified_base 20: mod_base = OTHER; note 2-(1R-(uracil-1-yl)-2R-hydroxypropoxy)-1,3-dihydroxybutane
  misc_feature 19..20: note = RNA
  misc_feature 1..18: note = DNA
tttttttttttttttttttt

SEQ ID NO: 144 - DNA, 20 bp, synthetic construct
  source 1..20: mol_type = other DNA
  modified_base 19: mod_base = OTHER; note 2-(1R-(uracil-1-yl)-2R-hydroxypropoxy)-1,3-dihydroxybutane 1-phosphorothioate
  modified_base 20: mod_base = OTHER; note 2-(1R-(uracil-1-yl)-2R-hydroxypropoxy)-1,3-dihydroxybutane
  misc_feature 19..20: note = RNA
  misc_feature 1..18: note = DNA
tttttttttttttttttttt

SEQ ID NO: 145 - DNA, 20 bp, synthetic construct
  source 1..20: mol_type = other DNA
  modified_base 19: mod_base = OTHER; note 2-(1R-(uracil-1-yl)-2R-hydroxypropoxy)-1,3-dihydroxybutane 1-phosphate
  misc_feature 19: note = RNA
  misc_feature 1..18: note = DNA
tttttttttttttttttttt

SEQ ID NO: 146 - DNA, 20 bp, synthetic construct
  source 1..20: mol_type = other DNA
  modified_base 19: mod_base = OTHER; note 2-(1R-(uracil-1-yl)-2R-hydroxypropoxy)-1,3-dihydroxybutane 1-phosphorothioate
  misc_feature 19: note = RNA
  misc_feature 1..18: note = DNA
tttttttttttttttttttt

SEQ ID NO: 147 - DNA, 20 bp, synthetic construct
  source 1..20: mol_type = other DNA
  modified_base 20: mod_base = OTHER; note 2-(1R-(uracil-1-yl)-2-hydroxyethoxy)-(2R,3S)-1,3-dihydroxyb utane
  misc_feature 20: note = RNA
  misc_feature 1..19: note = DNA
tttttttttttttttttttt

SEQ ID NO: 148 - DNA, 20 bp, synthetic construct
  source 1..20: mol_type = other DNA
  modified_base 19: mod_base = OTHER; note = 2'-deoxythymidine-3'-phosphorothioate
  modified_base 20: mod_base = OTHER; note 2-(1R-(uracil-1-yl)-2-hydroxyethoxy)-(2R,3S)-1,3-dihydroxyb utane
  misc_feature 20: note = RNA
  misc_feature 1..19: note = DNA
tttttttttttttttttttt

SEQ ID NO: 149 - DNA, 20 bp, synthetic construct
  source 1..20: mol_type = other DNA
  modified_base 19: mod_base = OTHER; note 2-(1R-(uracil-1-yl)-2-hydroxyethoxy)-(2R,3S)-1,3-dihydroxyb utane 3-phosphate
  modified_base 20: mod_base = OTHER; note 2-(1R-(uracil-1-yl)-2-hydroxyethoxy)-(2R,3S)-1,3-dihydroxyb utane
  misc_feature 19..20: note = RNA
  misc_feature 1..18: note = DNA
tttttttttttttttttttt

SEQ ID NO: 150 - DNA, 20 bp, synthetic construct
  source 1..20: mol_type = other DNA
  modified_base 19: mod_base = OTHER; note 2-(1R-(uracil-1-yl)-2-hydroxyethoxy)-(2R,3S)-1,3-dihydroxyb utane 3-phosphorothioate
  modified_base 20: mod_base = OTHER; note 2-(1R-(uracil-1-yl)-2-hydroxyethoxy)-(2R,3S)-1,3-dihydroxyb utane
  misc_feature 19..20: note = RNA
  misc_feature 1..18: note = DNA
tttttttttttttttttttt

SEQ ID NO: 151 - DNA, 20 bp, synthetic construct
  source 1..20: mol_type = other DNA
  modified_base 19: mod_base = OTHER; note 2-(1R-(uracil-1-yl)-2-hydroxyethoxy)-(2R,3S)-1,3-dihydroxyb utane 3-phosphate
  misc_feature 19: note = RNA
  misc_feature 1..18: note = DNA
tttttttttttttttttttt

SEQ ID NO: 152 - DNA, 20 bp, synthetic construct
  source 1..20: mol_type = other DNA
  modified_base 19: mod_base = OTHER; note 2-(1R-(uracil-1-yl)-2-hydroxyethoxy)-(2R,3S)-1,3-dihydroxyb utane 3-phosphorothioate
  misc_feature 19: note = RNA
  misc_feature 1..18: note = DNA
tttttttttttttttttttt

SEQ ID NO: 153 - DNA, 20 bp, synthetic construct
  source 1..20: mol_type = other DNA
  modified_base 20: mod_base = OTHER; note 2-(1R-(uracil-1-yl)-2-hydroxyethoxy)-(2R,3R)-1,3-dihydroxyb utane
  misc_feature 20: note = RNA
  misc_feature 1..19: note = DNA
tttttttttttttttttttt

SEQ ID NO: 154 - DNA, 20 bp, synthetic construct
  source 1..20: mol_type = other DNA
  modified_base 19: mod_base = OTHER; note = 2'-deoxythymidine-3'-phosphorothioate
  modified_base 20: mod_base = OTHER; note 2-(1R-(uracil-1-yl)-2-hydroxyethoxy)-(2R,3R)-1,3-dihydroxyb utane
  misc_feature 20: note = RNA
  misc_feature 1..19: note = DNA
tttttttttttttttttttt

SEQ ID NO: 155 - DNA, 20 bp, synthetic construct
  source 1..20: mol_type = other DNA
  modified_base 19: mod_base = OTHER; note 2-(1R-(uracil-1-yl)-2-hydroxyethoxy)-(2R,3R)-1,3-dihydroxyb utane 3-phosphate
  modified_base 20: mod_base = OTHER; note 2-(1R-(uracil-1-yl)-2-hydroxyethoxy)-(2R,3R)-1,3-dihydroxyb utane
  misc_feature 19..20: note = RNA
  misc_feature 1..18: note = DNA
tttttttttttttttttttt

SEQ ID NO: 156 - DNA, 20 bp, synthetic construct
  source 1..20: mol_type = other DNA
  modified_base 19: mod_base = OTHER; note 2-(1R-(uracil-1-yl)-2-hydroxyethoxy)-(2R,3R)-1,3-dihydroxyb utane 3-phosphorothioate
  modified_base 20: mod_base = OTHER; note 2-(1R-(uracil-1-yl)-2-hydroxyethoxy)-(2R,3R)-1,3-dihydroxyb utane
  misc_feature 19..20: note = RNA
  misc_feature 1..18: note = DNA
tttttttttttttttttttt

SEQ ID NO: 157 - DNA, 20 bp, synthetic construct
  source 1..20: mol_type = other DNA
  modified_base 19: mod_base = OTHER; note 2-(1R-(uracil-1-yl)-2-hydroxyethoxy)-(2R,3R)-1,3-dihydroxyb utane 3-phosphate
  misc_feature 19: note = RNA
  misc_feature 1..18: note = DNA
tttttttttttttttttttt

SEQ ID NO: 158 - DNA, 20 bp, synthetic construct
  source 1..20: mol_type = other DNA
  modified_base 19: mod_base = OTHER; note 2-(1R-(uracil-1-yl)-2-hydroxyethoxy)-(2R,3R)-1,3-dihydroxyb utane 3-phosphorothioate
  misc_feature 19: note = RNA
  misc_feature 1..18: note = DNA
tttttttttttttttttttt

SEQ ID NO: 159 - DNA, 20 bp, synthetic construct
  source 1..20: mol_type = other DNA
  modified_base 20: mod_base = OTHER; note 2-(1R-(uracil-1-yl)-2-hydroxyethoxy)-1,3-dihydroxy-2-methox ypropane
  misc_feature 20: note = RNA
  misc_feature 1..19: note = DNA
tttttttttttttttttttt

SEQ ID NO: 160 - DNA, 20 bp, synthetic construct
  source 1..20: mol_type = other DNA
  modified_base 19: mod_base = OTHER; note = 2'-deoxythymidine-3'-phosphorothioate
  modified_base 20: mod_base = OTHER; note 2-(1R-(uracil-1-yl)-2-hydroxyethoxy)-1,3-dihydroxy-2-methox ypropane
  misc_feature 20: note = RNA
  misc_feature 1..19: note = DNA
tttttttttttttttttttt

SEQ ID NO: 161 - DNA, 20 bp, synthetic construct
  source 1..20: mol_type = other DNA
  modified_base 19: mod_base = OTHER; note 2-(1R-(uracil-1-yl)-2-hydroxyethoxy)-1,3-dihydroxy-2-methox ypropane 1-phosphate
  modified_base 20: mod_base = OTHER; note 2-(1R-(uracil-1-yl)-2-hydroxyethoxy)-1,3-dihydroxy-2-methox ypropane
  misc_feature 19..20: note = RNA
  misc_feature 1..18: note = DNA
tttttttttttttttttttt

SEQ ID NO: 162 - DNA, 20 bp, synthetic construct
  source 1..20: mol_type = other DNA
  modified_base 19: mod_base = OTHER; note 2-(1R-(uracil-1-yl)-2-hydroxyethoxy)-1,3-dihydroxy-2-methox ypropane 1-phosphorothioate
  modified_base 20: mod_base = OTHER; note 2-(1R-(uracil-1-yl)-2-hydroxyethoxy)-1,3-dihydroxy-2-methox ypropane
  misc_feature 19..20: note = RNA
  misc_feature 1..18: note = DNA
tttttttttttttttttttt

SEQ ID NO: 163 - DNA, 20 bp, synthetic construct
  source 1..20: mol_type = other DNA
  modified_base 19: mod_base = OTHER; note 2-(1R-(uracil-1-yl)-2-hydroxyethoxy)-1,3-dihydroxy-2-methox ypropane 1-phosphate
  misc_feature 19: note = RNA
  misc_feature 1..18: note = DNA
tttttttttttttttttttt

SEQ ID NO: 164 - DNA, 20 bp, synthetic construct
  source 1..20: mol_type = other DNA
  modified_base 19: mod_base = OTHER; note 2-(1R-(uracil-1-yl)-2-hydroxyethoxy)-1,3-dihydroxy-2-methox ypropane 1-phosphorothioate
  misc_feature 19: note = RNA
  misc_feature 1..18: note = DNA
tttttttttttttttttttt

SEQ ID NO: 165 - DNA, 20 bp, synthetic construct
  source 1..20: mol_type = other DNA
  modified_base 20: mod_base = OTHER; note 2-(1S-(uracil-1-yl)-2-hydroxyethoxy)-(2S,3R)-1,3-dihydroxyb utane
  misc_feature 20: note = RNA
  misc_feature 1..19: note = DNA
tttttttttttttttttttt

SEQ ID NO: 166 - DNA, 20 bp, synthetic construct
  source 1..20: mol_type = other DNA
  modified_base 19: mod_base = OTHER; note = 2'-deoxythymidine-3'-phosphorothioate
  modified_base 20: mod_base = OTHER; note 2-(1S-(uracil-1-yl)-2-hydroxyethoxy)-(2S,3R)-1,3-dihydroxyb utane
  misc_feature 20: note = RNA
  misc_feature 1..19: note = DNA
tttttttttttttttttttt

SEQ ID NO: 167 - DNA, 20 bp, synthetic construct
  source 1..20: mol_type = other DNA
  modified_base 19: mod_base = OTHER; note 2-(1S-(uracil-1-yl)-2-hydroxyethoxy)-(2S,3R)-1,3-dihydroxyb utane 3-phosphate
  modified_base 20: mod_base = OTHER; note 2-(1S-(uracil-1-yl)-2-hydroxyethoxy)-(2S,3R)-1,3-dihydroxyb utane
  misc_feature 19..20: note = RNA
  misc_feature 1..18: note = DNA
tttttttttttttttttttt

SEQ ID NO: 168 - DNA, 20 bp, synthetic construct
  source 1..20: mol_type = other DNA
  modified_base 19: mod_base = OTHER; note 2-(1S-(uracil-1-yl)-2-hydroxyethoxy)-(2S,3R)-1,3-dihydroxyb utane 3-phosphorothioate
  modified_base 20: mod_base = OTHER; note 2-(1S-(uracil-1-yl)-2-hydroxyethoxy)-(2S,3R)-1,3-dihydroxyb utane
  misc_feature 19..20: note = RNA
  misc_feature 1..18: note = DNA
tttttttttttttttttttt

SEQ ID NO: 169 - DNA, 20 bp, synthetic construct
  source 1..20: mol_type = other DNA
  modified_base 19: mod_base = OTHER; note 2-(1S-(uracil-1-yl)-2-hydroxyethoxy)-(2S,3R)-1,3-dihydroxyb utane 3-phosphate
  misc_feature 19: note = RNA
  misc_feature 1..18: note = DNA
tttttttttttttttttttt

SEQ ID NO: 170 - DNA, 20 bp, synthetic construct
  source 1..20: mol_type = other DNA
  modified_base 19: mod_base = OTHER; note 2-(1S-(uracil-1-yl)-2-hydroxyethoxy)-(2S,3R)-1,3-dihydroxyb utane 3-phosphorothioate
  misc_feature 19: note = RNA
  misc_feature 1..18: note = DNA
tttttttttttttttttttt

SEQ ID NO: 171 - DNA, 20 bp, synthetic construct
  source 1..20: mol_type = other DNA
  modified_base 20: mod_base = OTHER; note 2-(1R-(uracil-1-yl)-2-hydroxyethoxy)-1,3-dihydroxypropane
  misc_feature 20: note = RNA
  misc_feature 1..19: note = DNA
tttttttttttttttttttt

SEQ ID NO: 172 - DNA, 20 bp, synthetic construct
  source 1..20: mol_type = other DNA
  modified_base 19: mod_base = OTHER; note = 2'-deoxythymidine-3'-phosphorothioate
  modified_base 20: mod_base = OTHER; note 2-(1R-(uracil-1-yl)-2-hydroxyethoxy)-1,3-dihydroxypropane
  misc_feature 20: note = RNA
  misc_feature 1..19: note = DNA
tttttttttttttttttttt

SEQ ID NO: 173 - DNA, 20 bp, synthetic construct
  source 1..20: mol_type = other DNA
  modified_base 19: mod_base = OTHER; note 2-(1R-(uracil-1-yl)-2-hydroxyethoxy)-1,3-dihydroxypropane 3-phosphate
  modified_base 20: mod_base = OTHER; note 2-(1R-(uracil-1-yl)-2-hydroxyethoxy)-1,3-dihydroxypropane
  misc_feature 19..20: note = RNA
  misc_feature 1..18: note = DNA
tttttttttttttttttttt

SEQ ID NO: 174 - DNA, 20 bp, synthetic construct
  source 1..20: mol_type = other DNA
  modified_base 19: mod_base = OTHER; note 2-(1R-(uracil-1-yl)-2-hydroxyethoxy)-1,3-dihydroxypropane 3-phosphorothioate
  modified_base 20: mod_base = OTHER; note 2-(1R-(uracil-1-yl)-2-hydroxyethoxy)-1,3-dihydroxypropane
  misc_feature 19..20: note = RNA
  misc_feature 1..18: note = DNA
tttttttttttttttttttt

SEQ ID NO: 175 - DNA, 20 bp, synthetic construct
  source 1..20: mol_type = other DNA
  modified_base 19: mod_base = OTHER; note 2-(1R-(uracil-1-yl)-2-hydroxyethoxy)-1,3-dihydroxypropane 3-phosphate
  misc_feature 19: note = RNA
  misc_feature 1..18: note = DNA
tttttttttttttttttttt

SEQ ID NO: 176 - DNA, 20 bp, synthetic construct
  source 1..20: mol_type = other DNA
  modified_base 19: mod_base = OTHER; note 2-(1R-(uracil-1-yl)-2-hydroxyethoxy)-1,3-dihydroxypropane 3-phosphorothioate
  misc_feature 19: note = RNA
  misc_feature 1..18: note = DNA
tttttttttttttttttttt

SEQ ID NO: 177 - RNA, 23 nt, synthetic construct
  source 1..23: mol_type = other RNA
  modified_base 1: mod_base = OTHER; note = 2'-O-methyluridine-3'-phosphorothioate
  modified_base 2: mod_base = OTHER; note = 2'-deoxy-2'-fluoroguanosine-3'-phosphorothioate
  modified_base 3: mod_base = OTHER; note = 2'-O-methyluridine-3'-phosphate
  modified_base 4: mod_base = OTHER; note = 2'-O-methyluridine-3'-phosphate
  modified_base 5: mod_base = OTHER; note = Thymidine-glycol nucleic acid (GNA), S-Isomer
  modified_base 6: mod_base = OTHER; note = 2'-O-methyladenosine-3'-phosphate
  modified_base 7: mod_base = OTHER; note = 2'-O-methyluridine-3'-phosphate
  modified_base 8: mod_base = OTHER; note = 2'-O-methyladenosine-3'-phosphate
  modified_base 9: mod_base = OTHER; note = 2'-O-methylguanosine-3'-phosphate
  modified_base 10: mod_base = OTHER; note = 2'-O-methyladenosine-3'-phosphate
  modified_base 11: mod_base = OTHER; note = 2'-O-methylguanosine-3'-phosphate
  modified_base 12: mod_base = OTHER; note = 2'-O-methylcytidine-3'-phosphate
  modified_base 13: mod_base = OTHER; note = 2'-O-methyladenosine-3'-phosphate
  modified_base 14: mod_base = OTHER; note = 2'-deoxy-2'-fluoroadenosine-3'-phosphate
  modified_base 15: mod_base = OTHER; note = 2'-O-methylguanosine-3'-phosphate
  modified_base 16: mod_base = OTHER; note = 2'-deoxy-2'-fluoroadenosine-3'-phosphate
  modified_base 17: mod_base = OTHER; note = 2'-O-methyladenosine-3'-phosphate
  modified_base 18: mod_base = OTHER; note = 2'-O-methylcytidine-3'-phosphate
  modified_base 19: mod_base = OTHER; note = 2'-O-methyladenosine-3'-phosphate
  modified_base 20: mod_base = OTHER; note = 2'-O-methylcytidine-3'-phosphate
  modified_base 21: mod_base = OTHER; note = 2'-O-methyluridine-3'-phosphorothioate
  modified_base 22: mod_base = OTHER; note = 2'-O-methylguanosine-3'-phosphorothioate
  modified_base 23: mod_base = OTHER; note = 2'-O-methyluridine
tgtttatagagcaagaacactgt

SEQ ID NO: 178 - RNA, 23 nt, synthetic construct
  source 1..23: mol_type = other RNA
  modified_base 1: mod_base = OTHER; note = 2'-O-methyluridine-3'-phosphorothioate
  modified_base 2: mod_base = OTHER; note = 2'-deoxy-2'-fluoroguanosine-3'-phosphorothioate
  modified_base 3: mod_base = OTHER; note = 2'-O-methyluridine-3'-phosphate
  modified_base 4: mod_base = OTHER; note = 2'-O-methyluridine-3'-phosphate
  modified_base 5: mod_base = OTHER; note = 2'-O-methyluridine-3'-phosphate
  modified_base 6: mod_base = OTHER; note = 2'-O-methyladenosine-3'-phosphate
  modified_base 7: mod_base = OTHER; note = Thymidine-glycol nucleic acid (GNA), S-Isomer
  modified_base 8: mod_base = OTHER; note = 2'-O-methyladenosine-3'-phosphate
  modified_base 9: mod_base = OTHER; note = 2'-O-methylguanosine-3'-phosphate
  modified_base 10: mod_base = OTHER; note = 2'-O-methyladenosine-3'-phosphate
  modified_base 11: mod_base = OTHER; note = 2'-O-methylguanosine-3'-phosphate
  modified_base 12: mod_base = OTHER; note = 2'-O-methylcytidine-3'-phosphate
  modified_base 13: mod_base = OTHER; note = 2'-O-methyladenosine-3'-phosphate
  modified_base 14: mod_base = OTHER; note = 2'-deoxy-2'-fluoroadenosine-3'-phosphate
  modified_base 15: mod_base = OTHER; note = 2'-O-methylguanosine-3'-phosphate
  modified_base 16: mod_base = OTHER; note = 2'-deoxy-2'-fluoroadenosine-3'-phosphate
  modified_base 17: mod_base = OTHER; note = 2'-O-methyladenosine-3'-phosphate
  modified_base 18: mod_base = OTHER; note = 2'-O-methylcytidine-3'-phosphate
  modified_base 19: mod_base = OTHER; note = 2'-O-methyladenosine-3'-phosphate
  modified_base 20: mod_base = OTHER; note = 2'-O-methylcytidine-3'-phosphate
  modified_base 21: mod_base = OTHER; note = 2'-O-methyluridine-3'-phosphorothioate
  modified_base 22: mod_base = OTHER; note = 2'-O-methylguanosine-3'-phosphorothioate
  modified_base 23: mod_base = OTHER; note = 2'-O-methyluridine
tgtttatagagcaagaacactgt

SEQ ID NO: 179 - RNA, 23 nt, synthetic construct
  source 1..23: mol_type = other RNA
  modified_base 1: mod_base = OTHER; note = 2'-O-methyladenosine-3'-phosphorothioate
  modified_base 2: mod_base = OTHER; note = 2'-deoxy-2'-fluorocytidine-3'-phosphorothioate
  modified_base 3: mod_base = OTHER; note = 2'-O-methyladenosine-3'-phosphate
  modified_base 4: mod_base = OTHER; note = 2'-O-methylcytidine-3'-phosphate
  modified_base 5: mod_base = OTHER; note = 2'-O-methylguanosine-3'-phosphate
  modified_base 6: mod_base = OTHER; note = 2'-O-methylguanosine-3'-phosphate
  modified_base 7: mod_base = OTHER; note = Thymidine-glycol nucleic acid (GNA), S-Isomer
  modified_base 8: mod_base = OTHER; note = 2'-O-methyluridine-3'-phosphate
  modified_base 9: mod_base = OTHER; note = 2'-O-methyluridine-3'-phosphate
  modified_base 10: mod_base = OTHER; note = 2'-O-methyladenosine-3'-phosphate
  modified_base 11: mod_base = OTHER; note = 2'-O-methyluridine-3'-phosphate
  modified_base 12: mod_base = OTHER; note = 2'-O-methyladenosine-3'-phosphate
  modified_base 13: mod_base = OTHER; note = 2'-O-methylguanosine-3'-phosphate
  modified_base 14: mod_base = OTHER; note = 2'-deoxy-2'-fluoroadenosine-3'-phosphate
  modified_base 15: mod_base = OTHER; note = 2'-O-methylguanosine-3'-phosphate
  modified_base 16: mod_base = OTHER; note = 2'-deoxy-2'-fluorocytidine-3'-phosphate
  modified_base 17: mod_base = OTHER; note = 2'-O-methyladenosine-3'-phosphate
  modified_base 18: mod_base = OTHER; note = 2'-O-methyladenosine-3'-phosphate
  modified_base 19: mod_base = OTHER; note = 2'-O-methylguanosine-3'-phosphate
  modified_base 20: mod_base = OTHER; note = 2'-O-methyladenosine-3'-phosphate
  modified_base 21: mod_base = OTHER; note = 2'-O-methyladenosine-3'-phosphorothioate
  modified_base 22: mod_base = OTHER; note = 2'-O-methylcytidine-3'-phosphorothioate
  modified_base 23: mod_base = OTHER; note = 2'-O-methyladenosine
acacggtttatagagcaagaaca

SEQ ID NO: 180 - RNA, 23 nt, synthetic construct
  source 1..23: mol_type = other RNA
  modified_base 1: mod_base = OTHER; note = 2'-O-methyluridine-3'-phosphorothioate
  modified_base 2: mod_base = OTHER; note = 2'-deoxy-2'-fluoroguanosine-3'-phosphorothioate
  modified_base 3: mod_base = OTHER; note = 2'-O-methyluridine-3'-phosphate
  modified_base 4: mod_base = OTHER; note = 2'-O-methyluridine-3'-phosphate
  modified_base 5: mod_base = OTHER; note 2-(1R-(uracil-1-yl)-2-hydroxyethoxy)-1,3-dihydroxypropane 3-phosphate
  modified_base 6: mod_base = OTHER; note = 2'-O-methyladenosine-3'-phosphate
  modified_base 7: mod_base = OTHER; note = 2'-O-methyluridine-3'-phosphate
  modified_base 8: mod_base = OTHER; note = 2'-O-methyladenosine-3'-phosphate
  modified_base 9: mod_base = OTHER; note = 2'-O-methylguanosine-3'-phosphate
  modified_base 10: mod_base = OTHER; note = 2'-O-methyladenosine-3'-phosphate
  modified_base 11: mod_base = OTHER; note = 2'-O-methylguanosine-3'-phosphate
  modified_base 12: mod_base = OTHER; note = 2'-O-methylcytidine-3'-phosphate
  modified_base 13: mod_base = OTHER; note = 2'-O-methyladenosine-3'-phosphate
  modified_base 14: mod_base = OTHER; note = 2'-deoxy-2'-fluoroadenosine-3'-phosphate
  modified_base 15: mod_base = OTHER; note = 2'-O-methylguanosine-3'-phosphate
  modified_base 16: mod_base = OTHER; note = 2'-deoxy-2'-fluoroadenosine-3'-phosphate
  modified_base 17: mod_base = OTHER; note = 2'-O-methyladenosine-3'-phosphate
  modified_base 18: mod_base = OTHER; note = 2'-O-methylcytidine-3'-phosphate
  modified_base 19: mod_base = OTHER; note = 2'-O-methyladenosine-3'-phosphate
  modified_base 20: mod_base = OTHER; note = 2'-O-methylcytidine-3'-phosphate
  modified_base 21: mod_base = OTHER; note = 2'-O-methyluridine-3'-phosphorothioate
  modified_base 22: mod_base = OTHER; note = 2'-O-methylguanosine-3'-phosphorothioate
  modified_base 23: mod_base = OTHER; note = 2'-O-methyluridine
tgtttatagagcaagaacactgt

SEQ ID NO: 181 - RNA, 23 nt, synthetic construct
  source 1..23: mol_type = other RNA
  modified_base 1: mod_base = OTHER; note = 2'-O-methyluridine-3'-phosphorothioate
  modified_base 2: mod_base = OTHER; note = 2'-deoxy-2'-fluoroguanosine-3'-phosphorothioate
  modified_base 3: mod_base = OTHER; note = 2'-O-methyluridine-3'-phosphate
  modified_base 4: mod_base = OTHER; note = 2'-O-methyluridine-3'-phosphate
  modified_base 5: mod_base = OTHER; note = 2'-O-methyluridine-3'-phosphate
  modified_base 6: mod_base = OTHER; note = 2'-O-methyladenosine-3'-phosphate
  modified_base 7: mod_base = OTHER; note 2-(1R-(uracil-1-yl)-2-hydroxyethoxy)-1,3-dihydroxypropane 3-phosphate
  modified_base 8: mod_base = OTHER; note = 2'-O-methyladenosine-3'-phosphate
  modified_base 9: mod_base = OTHER; note = 2'-O-methylguanosine-3'-phosphate
  modified_base 10: mod_base = OTHER; note = 2'-O-methyladenosine-3'-phosphate
  modified_base 11: mod_base = OTHER; note = 2'-O-methylguanosine-3'-phosphate
  modified_base 12: mod_base = OTHER; note = 2'-O-methylcytidine-3'-phosphate
  modified_base 13: mod_base = OTHER; note = 2'-O-methyladenosine-3'-phosphate
  modified_base 14: mod_base = OTHER; note = 2'-deoxy-2'-fluoroadenosine-3'-phosphate
  modified_base 15: mod_base = OTHER; note = 2'-O-methylguanosine-3'-phosphate
  modified_base 16: mod_base = OTHER; note = 2'-deoxy-2'-fluoroadenosine-3'-phosphate
  modified_base 17: mod_base = OTHER; note = 2'-O-methyladenosine-3'-phosphate
  modified_base 18: mod_base = OTHER; note = 2'-O-methylcytidine-3'-phosphate
  modified_base 19: mod_base = OTHER; note = 2'-O-methyladenosine-3'-phosphate
  modified_base 20: mod_base = OTHER; note = 2'-O-methylcytidine-3'-phosphate
  modified_base 21: mod_base = OTHER; note = 2'-O-methyluridine-3'-phosphorothioate
  modified_base 22: mod_base = OTHER; note = 2'-O-methylguanosine-3'-phosphorothioate
  modified_base 23: mod_base = OTHER; note = 2'-O-methyluridine
tgtttatagagcaagaacactgt

SEQ ID NO: 182 - RNA, 23 nt, synthetic construct
  source 1..23: mol_type = other RNA
  modified_base 1: mod_base = OTHER; note = 2'-O-methyladenosine-3'-phosphorothioate
  modified_base 2: mod_base = OTHER; note = 2'-deoxy-2'-fluorocytidine-3'-phosphorothioate
  modified_base 3: mod_base = OTHER; note = 2'-O-methyladenosine-3'-phosphate
  modified_base 4: mod_base = OTHER; note = 2'-O-methylcytidine-3'-phosphate
  modified_base 5: mod_base = OTHER; note = 2'-O-methylguanosine-3'-phosphate
  modified_base 6: mod_base = OTHER; note = 2'-O-methylguanosine-3'-phosphate
  modified_base 7: mod_base = OTHER; note 2-(1R-(uracil-1-yl)-2-hydroxyethoxy)-1,3-dihydroxypropane 3-phosphate
  modified_base 8: mod_base = OTHER; note = 2'-O-methyluridine-3'-phosphate
  modified_base 9: mod_base = OTHER; note = 2'-O-methyluridine-3'-phosphate
  modified_base 10: mod_base = OTHER; note = 2'-O-methyladenosine-3'-phosphate
  modified_base 11: mod_base = OTHER; note = 2'-O-methyluridine-3'-phosphate
  modified_base 12: mod_base = OTHER; note = 2'-O-methyladenosine-3'-phosphate
  modified_base 13: mod_base = OTHER; note = 2'-O-methylguanosine-3'-phosphate
  modified_base 14: mod_base = OTHER; note = 2'-deoxy-2'-fluoroadenosine-3'-phosphate
  modified_base 15: mod_base = OTHER; note = 2'-O-methylguanosine-3'-phosphate
  modified_base 16: mod_base = OTHER; note = 2'-deoxy-2'-fluorocytidine-3'-phosphate
  modified_base 17: mod_base = OTHER; note = 2'-O-methyladenosine-3'-phosphate
  modified_base 18: mod_base = OTHER; note = 2'-O-methyladenosine-3'-phosphate
  modified_base 19: mod_base = OTHER; note = 2'-O-methylguanosine-3'-phosphate
  modified_base 20: mod_base = OTHER; note = 2'-O-methyladenosine-3'-phosphate
  modified_base 21: mod_base = OTHER; note = 2'-O-methyladenosine-3'-phosphorothioate
  modified_base 22: mod_base = OTHER; note = 2'-O-methylcytidine-3'-phosphorothioate
  modified_base 23: mod_base = OTHER; note = 2'-O-methyladenosine
acacggtttatagagcaagaaca

SEQ ID NO: 183 - RNA, 23 nt, synthetic construct
  source 1..23: mol_type = other RNA
  modified_base 1: mod_base = OTHER; note = 2'-O-methyladenosine-3'-phosphorothioate
  modified_base 2: mod_base = OTHER; note = 2'-deoxy-2'-fluorocytidine-3'-phosphorothioate
  modified_base 3: mod_base = OTHER; note = 2'-O-methyladenosine-3'-phosphate
  modified_base 4: mod_base = OTHER; note = 2'-O-methylcytidine-3'-phosphate
  modified_base 5: mod_base = OTHER; note = 2'-O-methylguanosine-3'-phosphate
  modified_base 6: mod_base = OTHER; note = 2'-O-methylguanosine-3'-phosphate
  modified_base 7: mod_base = OTHER; note 2-(1R-(uracil-1-yl)-2-hydroxyethoxy)-1,3-(2S,3S)-dihydroxyb utane 1-phosphate
  modified_base 8: mod_base = OTHER; note = 2'-O-methyluridine-3'-phosphate
  modified_base 9: mod_base = OTHER; note = 2'-O-methyluridine-3'-phosphate
  modified_base 10: mod_base = OTHER; note = 2'-O-methyladenosine-3'-phosphate
  modified_base 11: mod_base = OTHER; note = 2'-O-methyluridine-3'-phosphate
  modified_base 12: mod_base = OTHER; note = 2'-O-methyladenosine-3'-phosphate
  modified_base 13: mod_base = OTHER; note = 2'-O-methylguanosine-3'-phosphate
  modified_base 14: mod_base = OTHER; note = 2'-deoxy-2'-fluoroadenosine-3'-phosphate
  modified_base 15: mod_base = OTHER; note = 2'-O-methylguanosine-3'-phosphate
  modified_base 16: mod_base = OTHER; note = 2'-deoxy-2'-fluorocytidine-3'-phosphate
  modified_base 17: mod_base = OTHER; note = 2'-O-methyladenosine-3'-phosphate
  modified_base 18: mod_base = OTHER; note = 2'-O-methyladenosine-3'-phosphate
  modified_base 19: mod_base = OTHER; note = 2'-O-methylguanosine-3'-phosphate
  modified_base 20: mod_base = OTHER; note = 2'-O-methyladenosine-3'-phosphate
  modified_base 21: mod_base = OTHER; note = 2'-O-methyladenosine-3'-phosphorothioate
  modified_base 22: mod_base = OTHER; note = 2'-O-methylcytidine-3'-phosphorothioate
  modified_base 23: mod_base = OTHER; note = 2'-O-methyladenosine
acacggtttatagagcaagaaca

SEQ ID NO: 184 - RNA, 23 nt, synthetic construct
  source 1..23: mol_type = other RNA
  modified_base 1: mod_base = OTHER; note = 2'-O-methyladenosine-3'-phosphorothioate
  modified_base 2: mod_base = OTHER; note = 2'-deoxy-2'-fluorocytidine-3'-phosphorothioate
  modified_base 3: mod_base = OTHER; note = 2'-O-methyladenosine-3'-phosphate
  modified_base 4: mod_base = OTHER; note = 2'-O-methylcytidine-3'-phosphate
  modified_base 5: mod_base = OTHER; note = 2'-O-methylguanosine-3'-phosphate
  modified_base 6: mod_base = OTHER; note = 2'-O-methylguanosine-3'-phosphate
  modified_base 7: mod_base = OTHER; note 2-(1R-(uracil-1-yl)-2-hydroxyethoxy)-1,3-(2S,3R)-dihydroxyb utane 1-phosphate
  modified_base 8: mod_base = OTHER; note = 2'-O-methyluridine-3'-phosphate
  modified_base 9: mod_base = OTHER; note = 2'-O-methyluridine-3'-phosphate
  modified_base 10: mod_base = OTHER; note = 2'-O-methyladenosine-3'-phosphate
  modified_base 11: mod_base = OTHER; note = 2'-O-methyluridine-3'-phosphate
  modified_base 12: mod_base = OTHER; note = 2'-O-methyladenosine-3'-phosphate
  modified_base 13: mod_base = OTHER; note = 2'-O-methylguanosine-3'-phosphate
  modified_base 14: mod_base = OTHER; note = 2'-deoxy-2'-fluoroadenosine-3'-phosphate
  modified_base 15: mod_base = OTHER; note = 2'-O-methylguanosine-3'-phosphate
  modified_base 16: mod_base = OTHER; note = 2'-deoxy-2'-fluorocytidine-3'-phosphate
  modified_base 17: mod_base = OTHER; note = 2'-O-methyladenosine-3'-phosphate
  modified_base 18: mod_base = OTHER; note = 2'-O-methyladenosine-3'-phosphate
  modified_base 19: mod_base = OTHER; note = 2'-O-methylguanosine-3'-phosphate
  modified_base 20: mod_base = OTHER; note = 2'-O-methyladenosine-3'-phosphate
  modified_base 21: mod_base = OTHER; note = 2'-O-methyladenosine-3'-phosphorothioate
  modified_base 22: mod_base = OTHER; note = 2'-O-methylcytidine-3'-phosphorothioate
  modified_base 23: mod_base = OTHER; note = 2'-O-methyladenosine
acacggtttatagagcaagaaca

SEQ ID NO: 185 - RNA, 23 nt, synthetic construct
  source 1..23: mol_type = other RNA
  modified_base 1: mod_base = OTHER; note = 2'-O-methyladenosine-3'-phosphorothioate
  modified_base 2: mod_base = OTHER; note = 2'-deoxy-2'-fluorocytidine-3'-phosphorothioate
  modified_base 3: mod_base = OTHER; note = 2'-O-methyladenosine-3'-phosphate
  modified_base 4: mod_base = OTHER; note = 2'-O-methylcytidine-3'-phosphate
  modified_base 5: mod_base = OTHER; note = 2'-O-methylguanosine-3'-phosphate
  modified_base 6: mod_base = OTHER; note = 2'-O-methylguanosine-3'-phosphate
  modified_base 7: mod_base = OTHER; note 2-(1R-(uracil-1-yl)-2S-hydroxypropoxy)-1,3-dihydroxybutane 1-phosphate
  modified_base 8: mod_base = OTHER; note = 2'-O-methyluridine-3'-phosphate
  modified_base 9: mod_base = OTHER; note = 2'-O-methyluridine-3'-phosphate
  modified_base 10: mod_base = OTHER; note = 2'-O-methyladenosine-3'-phosphate
  modified_base 11: mod_base = OTHER; note = 2'-O-methyluridine-3'-phosphate
  modified_base 12: mod_base = OTHER; note = 2'-O-methyladenosine-3'-phosphate
  modified_base 13: mod_base = OTHER; note = 2'-O-methylguanosine-3'-phosphate
  modified_base 14: mod_base = OTHER; note = 2'-deoxy-2'-fluoroadenosine-3'-phosphate
  modified_base 15: mod_base = OTHER; note = 2'-O-methylguanosine-3'-phosphate
  modified_base 16: mod_base = OTHER; note = 2'-deoxy-2'-fluorocytidine-3'-phosphate
  modified_base 17: mod_base = OTHER; note = 2'-O-methyladenosine-3'-phosphate
  modified_base 18: mod_base = OTHER; note = 2'-O-methyladenosine-3'-phosphate
  modified_base 19: mod_base = OTHER; note = 2'-O-methylguanosine-3'-phosphate
  modified_base 20: mod_base = OTHER; note = 2'-O-methyladenosine-3'-phosphate
  modified_base 21: mod_base = OTHER; note = 2'-O-methyladenosine-3'-phosphorothioate
  modified_base 22: mod_base = OTHER; note = 2'-O-methylcytidine-3'-phosphorothioate
  modified_base 23: mod_base = OTHER; note = 2'-O-methyladenosine
acacggtttatagagcaagaaca

SEQ ID NO: 186 - RNA, 23 nt, synthetic construct
  source 1..23: mol_type = other RNA
  modified_base 1: mod_base = OTHER; note = 2'-O-methyladenosine-3'-phosphorothioate
  modified_base 2: mod_base = OTHER; note = 2'-deoxy-2'-fluorocytidine-3'-phosphorothioate
  modified_base 3: mod_base = OTHER; note = 2'-O-methyladenosine-3'-phosphate
  modified_base 4: mod_base = OTHER; note = 2'-O-methylcytidine-3'-phosphate
  modified_base 5: mod_base = OTHER; note = 2'-O-methylguanosine-3'-phosphate
  modified_base 6: mod_base = OTHER; note = 2'-O-methylguanosine-3'-phosphate
  modified_base 7: mod_base = OTHER; note 2-(1R-(uracil-1-yl)-2R-hydroxypropoxy)-1,3-dihydroxybutane 1-phosphate
  modified_base 8: mod_base = OTHER; note = 2'-O-methyluridine-3'-phosphate
  modified_base 9: mod_base = OTHER; note = 2'-O-methyluridine-3'-phosphate
  modified_base 10: mod_base = OTHER; note = 2'-O-methyladenosine-3'-phosphate
  modified_base 11: mod_base = OTHER; note = 2'-O-methyluridine-3'-phosphate
  modified_base 12: mod_base = OTHER; note = 2'-O-methyladenosine-3'-phosphate
  modified_base 13: mod_base = OTHER; note = 2'-O-methylguanosine-3'-phosphate
  modified_base 14: mod_base = OTHER; note = 2'-deoxy-2'-fluoroadenosine-3'-phosphate
  modified_base 15: mod_base = OTHER; note = 2'-O-methylguanosine-3'-phosphate
  modified_base 16: mod_base = OTHER; note = 2'-deoxy-2'-fluorocytidine-3'-phosphate
  modified_base 17: mod_base = OTHER; note = 2'-O-methyladenosine-3'-phosphate
  modified_base 18: mod_base = OTHER; note = 2'-O-methyladenosine-3'-phosphate
  modified_base 19: mod_base = OTHER; note = 2'-O-methylguanosine-3'-phosphate
  modified_base 20: mod_base = OTHER; note = 2'-O-methyladenosine-3'-phosphate
  modified_base 21: mod_base = OTHER; note = 2'-O-methyladenosine-3'-phosphorothioate
  modified_base 22: mod_base = OTHER; note = 2'-O-methylcytidine-3'-phosphorothioate
  modified_base 23: mod_base = OTHER; note = 2'-O-methyladenosine
acacggtttatagagcaagaaca

SEQ ID NO: 187 - RNA, 23 nt, synthetic construct
  source 1..23: mol_type = other RNA
  modified_base 1: mod_base = OTHER; note = 2'-O-methyladenosine-3'-phosphorothioate
  modified_base 2: mod_base = OTHER; note = 2'-deoxy-2'-fluorocytidine-3'-phosphorothioate
  modified_base 3: mod_base = OTHER; note = 2'-O-methyladenosine-3'-phosphate
  modified_base 4: mod_base = OTHER; note = 2'-O-methylcytidine-3'-phosphate
  modified_base 5: mod_base = OTHER; note = 2'-O-methylguanosine-3'-phosphate
  modified_base 6: mod_base = OTHER; note = 2'-O-methylguanosine-3'-phosphate
  modified_base 7: mod_base = OTHER; note 2-(1R-(uracil-1-yl)-2-hydroxyethoxy)-(2R,3S)-1,3-dihydroxyb utane 3-phosphate
  modified_base 8: mod_base = OTHER; note = 2'-O-methyluridine-3'-phosphate
  modified_base 9: mod_base = OTHER; note = 2'-O-methyluridine-3'-phosphate
  modified_base 10: mod_base = OTHER; note = 2'-O-methyladenosine-3'-phosphate
  modified_base 11: mod_base = OTHER; note = 2'-O-methyluridine-3'-phosphate
  modified_base 12: mod_base = OTHER; note = 2'-O-methyladenosine-3'-phosphate
  modified_base 13: mod_base = OTHER; note = 2'-O-methylguanosine-3'-phosphate
  modified_base 14: mod_base = OTHER; note = 2'-deoxy-2'-fluoroadenosine-3'-phosphate
  modified_base 15: mod_base = OTHER; note = 2'-O-methylguanosine-3'-phosphate
  modified_base 16: mod_base = OTHER; note = 2'-deoxy-2'-fluorocytidine-3'-phosphate
  modified_base 17: mod_base = OTHER; note = 2'-O-methyladenosine-3'-phosphate
  modified_base 18: mod_base = OTHER; note = 2'-O-methyladenosine-3'-phosphate
  modified_base 19: mod_base = OTHER; note = 2'-O-methylguanosine-3'-phosphate
  modified_base 20: mod_base = OTHER; note = 2'-O-methyladenosine-3'-phosphate
  modified_base 21: mod_base = OTHER; note = 2'-O-methyladenosine-3'-phosphorothioate
  modified_base 22: mod_base = OTHER; note = 2'-O-methylcytidine-3'-phosphorothioate
  modified_base 23: mod_base = OTHER; note = 2'-O-methyladenosine
acacggtttatagagcaagaaca

SEQ ID NO: 188 - RNA, 23 nt, synthetic construct
  source 1..23: mol_type = other RNA
  modified_base 1: mod_base = OTHER; note = 2'-O-methyladenosine-3'-phosphorothioate
  modified_base 2: mod_base = OTHER; note = 2'-deoxy-2'-fluorocytidine-3'-phosphorothioate
  modified_base 3: mod_base = OTHER; note = 2'-O-methyladenosine-3'-phosphate
  modified_base 4: mod_base = OTHER; note = 2'-O-methylcytidine-3'-phosphate
  modified_base 5: mod_base = OTHER; note = 2'-O-methylguanosine-3'-phosphate
  modified_base 6: mod_base = OTHER; note = 2'-O-methylguanosine-3'-phosphate
  modified_base 7: mod_base = OTHER; note 2-(1R-(uracil-1-yl)-2-hydroxyethoxy)-(2R,3R)-1,3-dihydroxyb utane 3-phosphate
  modified_base 8: mod_base = OTHER; note = 2'-O-methyluridine-3'-phosphate
  modified_base 9: mod_base = OTHER; note = 2'-O-methyluridine-3'-phosphate
  modified_base 10: mod_base = OTHER; note = 2'-O-methyladenosine-3'-phosphate
  modified_base 11: mod_base = OTHER; note = 2'-O-methyluridine-3'-phosphate
  modified_base 12: mod_base = OTHER; note = 2'-O-methyladenosine-3'-phosphate
  modified_base 13: mod_base = OTHER; note = 2'-O-methylguanosine-3'-phosphate
  modified_base 14: mod_base = OTHER; note = 2'-deoxy-2'-fluoroadenosine-3'-phosphate
  modified_base 15: mod_base = OTHER; note = 2'-O-methylguanosine-3'-phosphate
  modified_base 16: mod_base = OTHER; note = 2'-deoxy-2'-fluorocytidine-3'-phosphate
  modified_base 17: mod_base = OTHER; note = 2'-O-methyladenosine-3'-phosphate
  modified_base 18: mod_base = OTHER; note = 2'-O-methyladenosine-3'-phosphate
  modified_base 19: mod_base = OTHER; note = 2'-O-methylguanosine-3'-phosphate
  modified_base 20: mod_base = OTHER; note = 2'-O-methyladenosine-3'-phosphate
  modified_base 21: mod_base = OTHER; note = 2'-O-methyladenosine-3'-phosphorothioate
  modified_base 22: mod_base = OTHER; note = 2'-O-methylcytidine-3'-phosphorothioate
  modified_base 23: mod_base = OTHER; note = 2'-O-methyladenosine
acacggtttatagagcaagaaca

SEQ ID NO: 189 - RNA, 23 nt, synthetic construct
  source 1..23: mol_type = other RNA
  modified_base 1: mod_base = OTHER; note = 2'-O-methyluridine-3'-phosphorothioate
  modified_base 2: mod_base = OTHER; note = 2'-deoxy-2'-fluoroguanosine-3'-phosphorothioate
  modified_base 3: mod_base = OTHER; note = 2'-O-methyluridine-3'-phosphate
  modified_base 4: mod_base = OTHER; note = 2'-O-methyluridine-3'-phosphate
  modified_base 5: mod_base = OTHER; note 2-(1R-(uracil-1-yl)-2-hydroxyethoxy)-1,3-(2S,3S)-dihydroxyb utane 1-phosphate
  modified_base 6: mod_base = OTHER; note = 2'-O-methyladenosine-3'-phosphate
  modified_base 7: mod_base = OTHER; note = 2'-O-methyluridine-3'-phosphate
  modified_base 8: mod_base = OTHER; note = 2'-O-methyladenosine-3'-phosphate
  modified_base 9: mod_base = OTHER; note = 2'-O-methylguanosine-3'-phosphate
  modified_base 10: mod_base = OTHER; note = 2'-O-methyladenosine-3'-phosphate
  modified_base 11: mod_base = OTHER; note = 2'-O-methylguanosine-3'-phosphate
  modified_base 12: mod_base = OTHER; note = 2'-O-methylcytidine-3'-phosphate
  modified_base 13: mod_base = OTHER; note = 2'-O-methyladenosine-3'-phosphate
  modified_base 14: mod_base = OTHER; note = 2'-deoxy-2'-fluoroadenosine-3'-phosphate
  modified_base 15: mod_base = OTHER; note = 2'-O-methylguanosine-3'-phosphate
  modified_base 16: mod_base = OTHER; note = 2'-deoxy-2'-fluoroadenosine-3'-phosphate
  modified_base 17: mod_base = OTHER; note = 2'-O-methyladenosine-3'-phosphate
  modified_base 18: mod_base = OTHER; note = 2'-O-methylcytidine-3'-phosphate
  modified_base 19: mod_base = OTHER; note = 2'-O-methyladenosine-3'-phosphate
  modified_base 20: mod_base = OTHER; note = 2'-O-methylcytidine-3'-phosphate
  modified_base 21: mod_base = OTHER; note = 2'-O-methyluridine-3'-phosphorothioate
  modified_base 22: mod_base = OTHER; note = 2'-O-methylguanosine-3'-phosphorothioate
  modified_base 23: mod_base = OTHER; note = 2'-O-methyluridine
tgtttatagagcaagaacactgt

SEQ ID NO: 190 - RNA, 23 nt, synthetic construct
  source 1..23: mol_type = other RNA
  modified_base 1: mod_base = OTHER; note = 2'-O-methyluridine-3'-phosphorothioate
  modified_base 2: mod_base = OTHER; note = 2'-deoxy-2'-fluoroguanosine-3'-phosphorothioate
  modified_base 3: mod_base = OTHER; note = 2'-O-methyluridine-3'-phosphate
  modified_base 4: mod_base = OTHER; note = 2'-O-methyluridine-3'-phosphate
  modified_base 5: mod_base = OTHER; note 2-(1R-(uracil-1-yl)-2-hydroxyethoxy)-1,3-(2S,3R)-dihydroxyb utane 1-phosphate
  modified_base 6: mod_base = OTHER; note = 2'-O-methyladenosine-3'-phosphate
  modified_base 7: mod_base = OTHER; note = 2'-O-methyluridine-3'-phosphate
  modified_base 8: mod_base = OTHER; note = 2'-O-methyladenosine-3'-phosphate
  modified_base 9: mod_base = OTHER; note = 2'-O-methylguanosine-3'-phosphate
  modified_base 10: mod_base = OTHER; note = 2'-O-methyladenosine-3'-phosphate
  modified_base 11: mod_base = OTHER; note = 2'-O-methylguanosine-3'-phosphate
  modified_base 12: mod_base = OTHER; note = 2'-O-methylcytidine-3'-phosphate
  modified_base 13: mod_base = OTHER; note = 2'-O-methyladenosine-3'-phosphate
  modified_base 14: mod_base = OTHER; note = 2'-deoxy-2'-fluoroadenosine-3'-phosphate
  modified_base 15: mod_base = OTHER; note = 2'-O-methylguanosine-3'-phosphate
  modified_base 16: mod_base = OTHER; note = 2'-deoxy-2'-fluoroadenosine-3'-phosphate
  modified_base 17: mod_base = OTHER; note = 2'-O-methyladenosine-3'-phosphate
  modified_base 18: mod_base = OTHER; note = 2'-O-methylcytidine-3'-phosphate
  modified_base 19: mod_base = OTHER; note = 2'-O-methyladenosine-3'-phosphate
  modified_base 20: mod_base = OTHER; note = 2'-O-methylcytidine-3'-phosphate
  modified_base 21: mod_base = OTHER; note = 2'-O-methyluridine-3'-phosphorothioate
  modified_base 22: mod_base = OTHER; note = 2'-O-methylguanosine-3'-phosphorothioate
  modified_base 23: mod_base = OTHER; note = 2'-O-methyluridine
tgtttatagagcaagaacactgt

SEQ ID NO: 191 - RNA, 23 nt, synthetic construct
  source 1..23: mol_type = other RNA
  modified_base 1: mod_base = OTHER; note = 2'-O-methyluridine-3'-phosphorothioate
  modified_base 2: mod_base = OTHER; note = 2'-deoxy-2'-fluoroguanosine-3'-phosphorothioate
  modified_base 3: mod_base = OTHER; note = 2'-O-methyluridine-3'-phosphate
  modified_base 4: mod_base = OTHER; note = 2'-O-methyluridine-3'-phosphate
  modified_base 5: mod_base = OTHER; note 2-(1R-(uracil-1-yl)-2S-hydroxypropoxy)-1,3-dihydroxybutane 1-phosphate
  modified_base 6: mod_base = OTHER; note = 2'-O-methyladenosine-3'-phosphate
  modified_base 7: mod_base = OTHER; note = 2'-O-methyluridine-3'-phosphate
  modified_base 8: mod_base = OTHER; note = 2'-O-methyladenosine-3'-phosphate
  modified_base 9: mod_base = OTHER; note = 2'-O-methylguanosine-3'-phosphate
  modified_base 10: mod_base = OTHER; note = 2'-O-methyladenosine-3'-phosphate
  modified_base 11: mod_base = OTHER; note = 2'-O-methylguanosine-3'-phosphate
  modified_base 12: mod_base = OTHER; note = 2'-O-methylcytidine-3'-phosphate
  modified_base 13: mod_base = OTHER; note = 2'-O-methyladenosine-3'-phosphate
  modified_base 14: mod_base = OTHER; note = 2'-deoxy-2'-fluoroadenosine-3'-phosphate
  modified_base 15: mod_base = OTHER; note = 2'-O-methylguanosine-3'-phosphate
  modified_base 16: mod_base = OTHER; note = 2'-deoxy-2'-fluoroadenosine-3'-phosphate
  modified_base 17: mod_base = OTHER; note = 2'-O-methyladenosine-3'-phosphate
  modified_base 18: mod_base = OTHER; note = 2'-O-methylcytidine-3'-phosphate
  modified_base 19: mod_base = OTHER; note = 2'-O-methyladenosine-3'-phosphate
  modified_base 20: mod_base = OTHER; note = 2'-O-methylcytidine-3'-phosphate
  modified_base 21: mod_base = OTHER; note = 2'-O-methyluridine-3'-phosphorothioate
  modified_base 22: mod_base = OTHER; note = 2'-O-methylguanosine-3'-phosphorothioate
  modified_base 23: mod_base = OTHER; note = 2'-O-methyluridine
tgtttatagagcaagaacactgt

SEQ ID NO: 192 - RNA, 23 nt, synthetic construct
  source 1..23: mol_type = other RNA
  modified_base 1: mod_base = OTHER; note = 2'-O-methyluridine-3'-phosphorothioate
  modified_base 2: mod_base = OTHER; note = 2'-deoxy-2'-fluoroguanosine-3'-phosphorothioate
  modified_base 3: mod_base = OTHER; note = 2'-O-methyluridine-3'-phosphate
  modified_base 4: mod_base = OTHER; note = 2'-O-methyluridine-3'-phosphate
  modified_base 5: mod_base = OTHER; note 2-(1R-(uracil-1-yl)-2R-hydroxypropoxy)-1,3-dihydroxybutane 1-phosphate
  modified_base 6: mod_base = OTHER; note = 2'-O-methyladenosine-3'-phosphate
  modified_base 7: mod_base = OTHER; note = 2'-O-methyluridine-3'-phosphate
  modified_base 8: mod_base = OTHER; note = 2'-O-methyladenosine-3'-phosphate
  modified_base 9: mod_base = OTHER; note = 2'-O-methylguanosine-3'-phosphate
  modified_base 10: mod_base = OTHER; note = 2'-O-methyladenosine-3'-phosphate
  modified_base 11: mod_base = OTHER; note = 2'-O-methylguanosine-3'-phosphate
  modified_base 12: mod_base = OTHER; note = 2'-O-methylcytidine-3'-phosphate
  modified_base 13: mod_base = OTHER; note = 2'-O-methyladenosine-3'-phosphate
  modified_base 14: mod_base = OTHER; note = 2'-deoxy-2'-fluoroadenosine-3'-phosphate
  modified_base 15: mod_base = OTHER; note = 2'-O-methylguanosine-3'-phosphate
  modified_base 16: mod_base = OTHER; note = 2'-deoxy-2'-fluoroadenosine-3'-phosphate
  modified_base 17: mod_base = OTHER; note = 2'-O-methyladenosine-3'-phosphate
  modified_base 18: mod_base = OTHER; note = 2'-O-methylcytidine-3'-phosphate
  modified_base 19: mod_base = OTHER; note = 2'-O-methyladenosine-3'-phosphate
  modified_base 20: mod_base = OTHER; note = 2'-O-methylcytidine-3'-phosphate
  modified_base 21: mod_base = OTHER; note = 2'-O-methyluridine-3'-phosphorothioate
  modified_base 22: mod_base = OTHER; note = 2'-O-methylguanosine-3'-phosphorothioate
  modified_base 23: mod_base = OTHER; note = 2'-O-methyluridine
tgtttatagagcaagaacactgt

SEQ ID NO: 193 - RNA, 23 nt, synthetic construct
  source 1..23: mol_type = other RNA
  modified_base 1: mod_base = OTHER; note = 2'-O-methyluridine-3'-phosphorothioate
  modified_base 2: mod_base = OTHER; note = 2'-deoxy-2'-fluoroguanosine-3'-phosphorothioate
  modified_base 3: mod_base = OTHER; note = 2'-O-methyluridine-3'-phosphate
  modified_base 4: mod_base = OTHER; note = 2'-O-methyluridine-3'-phosphate
  modified_base 5: mod_base = OTHER; note 2-(1R-(uracil-1-yl)-2-hydroxyethoxy)-(2R,3S)-1,3-dihydroxyb utane 3-phosphate
  modified_base 6: mod_base = OTHER; note = 2'-O-methyladenosine-3'-phosphate
  modified_base 7: mod_base = OTHER; note = 2'-O-methyluridine-3'-phosphate
  modified_base 8: mod_base = OTHER; note = 2'-O-methyladenosine-3'-phosphate
  modified_base 9: mod_base = OTHER; note = 2'-O-methylguanosine-3'-phosphate
  modified_base 10: mod_base = OTHER; note = 2'-O-methyladenosine-3'-phosphate
  modified_base 11: mod_base = OTHER; note = 2'-O-methylguanosine-3'-phosphate
  modified_base 12: mod_base = OTHER; note = 2'-O-methylcytidine-3'-phosphate
  modified_base 13: mod_base = OTHER; note = 2'-O-methyladenosine-3'-phosphate
  modified_base 14: mod_base = OTHER; note = 2'-deoxy-2'-fluoroadenosine-3'-phosphate
  modified_base 15: mod_base = OTHER; note = 2'-O-methylguanosine-3'-phosphate
  modified_base 16: mod_base = OTHER; note = 2'-deoxy-2'-fluoroadenosine-3'-phosphate
  modified_base 17: mod_base = OTHER; note = 2'-O-methyladenosine-3'-phosphate
  modified_base 18: mod_base = OTHER; note = 2'-O-methylcytidine-3'-phosphate
  modified_base 19: mod_base = OTHER; note = 2'-O-methyladenosine-3'-phosphate
  modified_base 20: mod_base = OTHER; note = 2'-O-methylcytidine-3'-phosphate
  modified_base 21: mod_base = OTHER; note = 2'-O-methyluridine-3'-phosphorothioate
  modified_base 22: mod_base = OTHER; note = 2'-O-methylguanosine-3'-phosphorothioate
  modified_base 23: mod_base = OTHER; note = 2'-O-methyluridine
tgtttatagagcaagaacactgt

SEQ ID NO: 194 - RNA, 23 nt, synthetic construct
  source 1..23: mol_type = other RNA
  modified_base 1: mod_base = OTHER; note = 2'-O-methyluridine-3'-phosphorothioate
  modified_base 2: mod_base = OTHER; note = 2'-deoxy-2'-fluoroguanosine-3'-phosphorothioate
  modified_base 3: mod_base = OTHER; note = 2'-O-methyluridine-3'-phosphate
  modified_base 4: mod_base = OTHER; note = 2'-O-methyluridine-3'-phosphate
  modified_base 5: mod_base = OTHER; note 2-(1R-(uracil-1-yl)-2-hydroxyethoxy)-(2R,3R)-1,3-dihydroxyb utane 3-phosphate
  modified_base 6: mod_base = OTHER; note = 2'-O-methyladenosine-3'-phosphate
  modified_base 7: mod_base = OTHER; note = 2'-O-methyluridine-3'-phosphate
  modified_base 8: mod_base = OTHER; note = 2'-O-methyladenosine-3'-phosphate
  modified_base 9: mod_base = OTHER; note = 2'-O-methylguanosine-3'-phosphate
  modified_base 10: mod_base = OTHER; note = 2'-O-methyladenosine-3'-phosphate
  modified_base 11: mod_base = OTHER; note = 2'-O-methylguanosine-3'-phosphate
  modified_base 12: mod_base = OTHER; note = 2'-O-methylcytidine-3'-phosphate
  modified_base 13: mod_base = OTHER; note = 2'-O-methyladenosine-3'-phosphate
  modified_base 14: mod_base = OTHER; note = 2'-deoxy-2'-fluoroadenosine-3'-phosphate
  modified_base 15: mod_base = OTHER; note = 2'-O-methylguanosine-3'-phosphate
  modified_base 16: mod_base = OTHER; note = 2'-deoxy-2'-fluoroadenosine-3'-phosphate
  modified_base 17: mod_base = OTHER; note = 2'-O-methyladenosine-3'-phosphate
  modified_base 18: mod_base = OTHER; note = 2'-O-methylcytidine-3'-phosphate
  modified_base 19: mod_base = OTHER; note = 2'-O-methyladenosine-3'-phosphate
  modified_base 20: mod_base = OTHER; note = 2'-O-methylcytidine-3'-phosphate
  modified_base 21: mod_base = OTHER; note = 2'-O-methyluridine-3'-phosphorothioate
  modified_base 22: mod_base = OTHER; note = 2'-O-methylguanosine-3'-phosphorothioate
  modified_base 23: mod_base = OTHER; note = 2'-O-methyluridine
tgtttatagagcaagaacactgt

SEQ ID NO: 195 - RNA, 23 nt, synthetic construct
  source 1..23: mol_type = other RNA
  modified_base 1: mod_base = OTHER; note = 2'-O-methyluridine-3'-phosphorothioate
  modified_base 2: mod_base = OTHER; note = 2'-deoxy-2'-fluoroguanosine-3'-phosphorothioate
  modified_base 3: mod_base = OTHER; note = 2'-O-methyluridine-3'-phosphate
  modified_base 4: mod_base = OTHER; note = 2'-O-methyluridine-3'-phosphate
  modified_base 5: mod_base = OTHER; note 2-(1R-(uracil-1-yl)-2-hydroxyethoxy)-1,3-dihydroxy-2-methox ypropane 1-phosphate
  modified_base 6: mod_base = OTHER; note = 2'-O-methyladenosine-3'-phosphate
  modified_base 7: mod_base = OTHER; note = 2'-O-methyluridine-3'-phosphate
  modified_base 8: mod_base = OTHER; note = 2'-O-methyladenosine-3'-phosphate
  modified_base 9: mod_base = OTHER; note = 2'-O-methylguanosine-3'-phosphate
  modified_base 10: mod_base = OTHER; note = 2'-O-methyladenosine-3'-phosphate
  modified_base 11: mod_base = OTHER; note = 2'-O-methylguanosine-3'-phosphate
  modified_base 12: mod_base = OTHER; note = 2'-O-methylcytidine-3'-phosphate
  modified_base 13: mod_base = OTHER; note = 2'-O-methyladenosine-3'-phosphate
  modified_base 14: mod_base = OTHER; note = 2'-deoxy-2'-fluoroadenosine-3'-phosphate
  modified_base 15: mod_base = OTHER; note = 2'-O-methylguanosine-3'-phosphate
  modified_base 16: mod_base = OTHER; note = 2'-deoxy-2'-fluoroadenosine-3'-phosphate
  modified_base 17: mod_base = OTHER; note = 2'-O-methyladenosine-3'-phosphate
  modified_base 18: mod_base = OTHER; note = 2'-O-methylcytidine-3'-phosphate
  modified_base 19: mod_base = OTHER; note = 2'-O-methyladenosine-3'-phosphate
  modified_base 20: mod_base = OTHER; note = 2'-O-methylcytidine-3'-phosphate
  modified_base 21: mod_base = OTHER; note = 2'-O-methyluridine-3'-phosphorothioate
  modified_base 22: mod_base = OTHER; note = 2'-O-methylguanosine-3'-phosphorothioate
  modified_base 23: mod_base = OTHER; note = 2'-O-methyluridine
tgtttatagagcaagaacactgt

SEQ ID NO: 196 - RNA, 23 nt, synthetic construct
  source 1..23: mol_type = other RNA
  modified_base 1: mod_base = OTHER; note = 2'-O-methyluridine-3'-phosphorothioate
  modified_base 2: mod_base = OTHER; note = 2'-deoxy-2'-fluoroguanosine-3'-phosphorothioate
  modified_base 3: mod_base = OTHER; note = 2'-O-methyluridine-3'-phosphate
  modified_base 4: mod_base = OTHER; note = 2'-O-methyluridine-3'-phosphate
  modified_base 5: mod_base = OTHER; note = 2'-O-methyluridine-3'-phosphate
  modified_base 6: mod_base = OTHER; note = 2'-O-methyladenosine-3'-phosphate
  modified_base 7: mod_base = OTHER; note 2-(1R-(uracil-1-yl)-2-hydroxyethoxy)-1,3-(2S,3S)-dihydroxyb utane 1-phosphate
  modified_base 8: mod_base = OTHER; note = 2'-O-methyladenosine-3'-phosphate
  modified_base 9: mod_base = OTHER; note = 2'-O-methylguanosine-3'-phosphate
  modified_base 10: mod_base = OTHER; note = 2'-O-methyladenosine-3'-phosphate
  modified_base 11: mod_base = OTHER; note = 2'-O-methylguanosine-3'-phosphate
  modified_base 12: mod_base = OTHER; note = 2'-O-methylcytidine-3'-phosphate
  modified_base 13: mod_base = OTHER; note = 2'-O-methyladenosine-3'-phosphate
  modified_base 14: mod_base = OTHER; note = 2'-deoxy-2'-fluoroadenosine-3'-phosphate
  modified_base 15: mod_base = OTHER; note = 2'-O-methylguanosine-3'-phosphate
  modified_base 16: mod_base = OTHER; note = 2'-deoxy-2'-fluoroadenosine-3'-phosphate
  modified_base 17: mod_base = OTHER; note = 2'-O-methyladenosine-3'-phosphate
  modified_base 18: mod_base = OTHER; note = 2'-O-methylcytidine-3'-phosphate
  modified_base 19: mod_base = OTHER; note = 2'-O-methyladenosine-3'-phosphate
  modified_base 20: mod_base = OTHER; note = 2'-O-methylcytidine-3'-phosphate
  modified_base 21: mod_base = OTHER; note = 2'-O-methyluridine-3'-phosphorothioate
  modified_base 22: mod_base = OTHER; note = 2'-O-methylguanosine-3'-phosphorothioate
  modified_base 23: mod_base = OTHER; note = 2'-O-methyluridine
tgtttatagagcaagaacactgt

SEQ ID NO: 197 - RNA, 23 nt, synthetic construct
  source 1..23: mol_type = other RNA
  modified_base 1: mod_base = OTHER; note = 2'-O-methyluridine-3'-phosphorothioate
  modified_base 2: mod_base = OTHER; note = 2'-deoxy-2'-fluoroguanosine-3'-phosphorothioate
  modified_base 3: mod_base = OTHER; note = 2'-O-methyluridine-3'-phosphate
  modified_base 4: mod_base = OTHER; note = 2'-O-methyluridine-3'-phosphate
  modified_base 5: mod_base = OTHER; note = 2'-O-methyluridine-3'-phosphate
  modified_base 6: mod_base = OTHER; note = 2'-O-methyladenosine-3'-phosphate
  modified_base 7: mod_base = OTHER; note 2-(1R-(uracil-1-yl)-2-hydroxyethoxy)-1,3-(2S,3R)-dihydroxyb utane 1-phosphate
  modified_base 8: mod_base = OTHER; note = 2'-O-methyladenosine-3'-phosphate
  modified_base 9: mod_base = OTHER; note = 2'-O-methylguanosine-3'-phosphate
  modified_base 10: mod_base = OTHER; note = 2'-O-methyladenosine-3'-phosphate
  modified_base 11: mod_base = OTHER; note = 2'-O-methylguanosine-3'-phosphate
  modified_base 12: mod_base = OTHER; note = 2'-O-methylcytidine-3'-phosphate
  modified_base 13: mod_base = OTHER; note = 2'-O-methyladenosine-3'-phosphate
  modified_base 14: mod_base = OTHER; note = 2'-deoxy-2'-fluoroadenosine-3'-phosphate
  modified_base 15: mod_base = OTHER; note = 2'-O-methylguanosine-3'-phosphate
  modified_base 16: mod_base = OTHER; note = 2'-deoxy-2'-fluoroadenosine-3'-phosphate
  modified_base 17: mod_base = OTHER; note = 2'-O-methyladenosine-3'-phosphate
  modified_base 18: mod_base = OTHER; note = 2'-O-methylcytidine-3'-phosphate
  modified_base 19: mod_base = OTHER; note = 2'-O-methyladenosine-3'-phosphate
  modified_base 20: mod_base = OTHER; note = 2'-O-methylcytidine-3'-phosphate
  modified_base 21: mod_base = OTHER; note = 2'-O-methyluridine-3'-phosphorothioate
  modified_base 22: mod_base = OTHER; note = 2'-O-methylguanosine-3'-phosphorothioate
  modified_base 23: mod_base = OTHER; note = 2'-O-methyluridine
tgtttatagagcaagaacactgt

SEQ ID NO: 198 - RNA, 23 nt, synthetic construct
  source 1..23: mol_type = other RNA
  modified_base 1: mod_base = OTHER; note = 2'-O-methyluridine-3'-phosphorothioate
  modified_base 2: mod_base = OTHER; note = 2'-deoxy-2'-fluoroguanosine-3'-phosphorothioate
  modified_base 3: mod_base = OTHER; note = 2'-O-methyluridine-3'-phosphate
  modified_base 4: mod_base = OTHER; note = 2'-O-methyluridine-3'-phosphate
  modified_base 5: mod_base = OTHER; note = 2'-O-methyluridine-3'-phosphate
  modified_base 6: mod_base = OTHER; note = 2'-O-methyladenosine-3'-phosphate
  modified_base 7: mod_base = OTHER; note 2-(1R-(uracil-1-yl)-2S-hydroxypropoxy)-1,3-dihydroxybutane 1-phosphate
  modified_base 8: mod_base = OTHER; note = 2'-O-methyladenosine-3'-phosphate
  modified_base 9: mod_base = OTHER; note = 2'-O-methylguanosine-3'-phosphate
  modified_base 10: mod_base = OTHER; note = 2'-O-methyladenosine-3'-phosphate
  modified_base 11: mod_base = OTHER; note = 2'-O-methylguanosine-3'-phosphate
  modified_base 12: mod_base = OTHER; note = 2'-O-methylcytidine-3'-phosphate
  modified_base 13: mod_base = OTHER; note = 2'-O-methyladenosine-3'-phosphate
  modified_base 14: mod_base = OTHER; note = 2'-deoxy-2'-fluoroadenosine-3'-phosphate
  modified_base 15: mod_base = OTHER; note = 2'-O-methylguanosine-3'-phosphate
  modified_base 16: mod_base = OTHER; note = 2'-deoxy-2'-fluoroadenosine-3'-phosphate
  modified_base 17: mod_base = OTHER; note = 2'-O-methyladenosine-3'-phosphate
  modified_base 18: mod_base = OTHER; note = 2'-O-methylcytidine-3'-phosphate
  modified_base 19: mod_base = OTHER; note = 2'-O-methyladenosine-3'-phosphate
  modified_base 20: mod_base = OTHER; note = 2'-O-methylcytidine-3'-phosphate
  modified_base 21: mod_base = OTHER; note = 2'-O-methyluridine-3'-phosphorothioate
  modified_base 22: mod_base = OTHER; note = 2'-O-methylguanosine-3'-phosphorothioate
  modified_base 23: mod_base = OTHER; note = 2'-O-methyluridine
tgtttatagagcaagaacactgt

SEQ ID NO: 199 - RNA, 23 nt, synthetic construct
  source 1..23: mol_type = other RNA
  modified_base 1: mod_base = OTHER; note = 2'-O-methyluridine-3'-phosphorothioate
  modified_base 2: mod_base = OTHER; note = 2'-deoxy-2'-fluoroguanosine-3'-phosphorothioate
  modified_base 3: mod_base = OTHER; note = 2'-O-methyluridine-3'-phosphate
  modified_base 4: mod_base = OTHER; note = 2'-O-methyluridine-3'-phosphate
  modified_base 5: mod_base = OTHER; note = 2'-O-methyluridine-3'-phosphate
  modified_base 6: mod_base = OTHER; note = 2'-O-methyladenosine-3'-phosphate
  modified_base 7: mod_base = OTHER; note 2-(1R-(uracil-1-yl)-2R-hydroxypropoxy)-1,3-dihydroxybutane 1-phosphate
  modified_base 8: mod_base = OTHER; note = 2'-O-methyladenosine-3'-phosphate
  modified_base 9: mod_base = OTHER; note = 2'-O-methylguanosine-3'-phosphate
  modified_base 10: mod_base = OTHER; note = 2'-O-methyladenosine-3'-phosphate
  modified_base 11: mod_base = OTHER; note = 2'-O-methylguanosine-3'-phosphate
  modified_base 12: mod_base = OTHER; note = 2'-O-methylcytidine-3'-phosphate
  modified_base 13: mod_base = OTHER; note = 2'-O-methyladenosine-3'-phosphate
  modified_base 14: mod_base = OTHER; note = 2'-deoxy-2'-fluoroadenosine-3'-phosphate
  modified_base 15: mod_base = OTHER; note = 2'-O-methylguanosine-3'-phosphate
  modified_base 16: mod_base = OTHER; note = 2'-deoxy-2'-fluoroadenosine-3'-phosphate
  modified_base 17: mod_base = OTHER; note = 2'-O-methyladenosine-3'-phosphate
  modified_base 18: mod_base = OTHER; note = 2'-O-methylcytidine-3'-phosphate
  modified_base 19: mod_base = OTHER; note = 2'-O-methyladenosine-3'-phosphate
  modified_base 20: mod_base = OTHER; note = 2'-O-methylcytidine-3'-phosphate
  modified_base 21: mod_base = OTHER; note = 2'-O-methyluridine-3'-phosphorothioate
  modified_base 22: mod_base = OTHER; note = 2'-O-methylguanosine-3'-phosphorothioate
  modified_base 23: mod_base = OTHER; note = 2'-O-methyluridine
tgtttatagagcaagaacactgt

SEQ ID NO: 200 - RNA, 23 nt, synthetic construct
  source 1..23: mol_type = other RNA
  modified_base 1: mod_base = OTHER; note = 2'-O-methyluridine-3'-phosphorothioate
  modified_base 2: mod_base = OTHER; note = 2'-deoxy-2'-fluoroguanosine-3'-phosphorothioate
  modified_base 3: mod_base = OTHER; note = 2'-O-methyluridine-3'-phosphate
  modified_base 4: mod_base = OTHER; note = 2'-O-methyluridine-3'-phosphate
  modified_base 5: mod_base = OTHER; note = 2'-O-methyluridine-3'-phosphate
  modified_base 6: mod_base = OTHER; note = 2'-O-methyladenosine-3'-phosphate
  modified_base 7: mod_base = OTHER; note 2-(1R-(uracil-1-yl)-2-hydroxyethoxy)-(2R,3S)-1,3-dihydroxyb utane 3-phosphate
  modified_base 8: mod_base = OTHER; note = 2'-O-methyladenosine-3'-phosphate
  modified_base 9: mod_base = OTHER; note = 2'-O-methylguanosine-3'-phosphate
  modified_base 10: mod_base = OTHER; note = 2'-O-methyladenosine-3'-phosphate
  modified_base 11: mod_base = OTHER; note = 2'-O-methylguanosine-3'-phosphate
  modified_base 12: mod_base = OTHER; note = 2'-O-methylcytidine-3'-phosphate
  modified_base 13: mod_base = OTHER; note = 2'-O-methyladenosine-3'-phosphate
  modified_base 14: mod_base = OTHER; note = 2'-deoxy-2'-fluoroadenosine-3'-phosphate
  modified_base 15: mod_base = OTHER; note = 2'-O-methylguanosine-3'-phosphate
  modified_base 16: mod_base = OTHER; note = 2'-deoxy-2'-fluoroadenosine-3'-phosphate
  modified_base 17: mod_base = OTHER; note = 2'-O-methyladenosine-3'-phosphate
  modified_base 18: mod_base = OTHER; note = 2'-O-methylcytidine-3'-phosphate
  modified_base 19: mod_base = OTHER; note = 2'-O-methyladenosine-3'-phosphate
  modified_base 20: mod_base = OTHER; note = 2'-O-methylcytidine-3'-phosphate
  modified_base 21: mod_base = OTHER; note = 2'-O-methyluridine-3'-phosphorothioate
  modified_base 22: mod_base = OTHER; note = 2'-O-methylguanosine-3'-phosphorothioate
  modified_base 23: mod_base = OTHER; note = 2'-O-methyluridine
tgtttatagagcaagaacactgt

SEQ ID NO: 201 - RNA, 23 nt, synthetic construct
  source 1..23: mol_type = other RNA
  modified_base 1: mod_base = OTHER; note = 2'-O-methyluridine-3'-phosphorothioate
  modified_base 2: mod_base = OTHER; note = 2'-deoxy-2'-fluoroguanosine-3'-phosphorothioate
  modified_base 3: mod_base = OTHER; note = 2'-O-methyluridine-3'-phosphate
  modified_base 4: mod_base = OTHER; note = 2'-O-methyluridine-3'-phosphate
  modified_base 5: mod_base = OTHER; note = 2'-O-methyluridine-3'-phosphate
  modified_base 6: mod_base = OTHER; note = 2'-O-methyladenosine-3'-phosphate
  modified_base 7: mod_base = OTHER; note 2-(1R-(uracil-1-yl)-2-hydroxyethoxy)-(2R,3R)-1,3-dihydroxyb utane 3-phosphate
  modified_base 8: mod_base = OTHER; note = 2'-O-methyladenosine-3'-phosphate
  modified_base 9: mod_base = OTHER; note = 2'-O-methylguanosine-3'-phosphate
  modified_base 10: mod_base = OTHER; note = 2'-O-methyladenosine-3'-phosphate
  modified_base 11: mod_base = OTHER; note = 2'-O-methylguanosine-3'-phosphate
  modified_base 12: mod_base = OTHER; note = 2'-O-methylcytidine-3'-phosphate
  modified_base 13: mod_base = OTHER; note = 2'-O-methyladenosine-3'-phosphate
  modified_base 14: mod_base = OTHER; note = 2'-deoxy-2'-fluoroadenosine-3'-phosphate
  modified_base 15: mod_base = OTHER; note = 2'-O-methylguanosine-3'-phosphate
  modified_base 16: mod_base = OTHER; note = 2'-deoxy-2'-fluoroadenosine-3'-phosphate
  modified_base 17: mod_base = OTHER; note = 2'-O-methyladenosine-3'-phosphate
  modified_base 18: mod_base = OTHER; note = 2'-O-methylcytidine-3'-phosphate
  modified_base 19: mod_base = OTHER; note = 2'-O-methyladenosine-3'-phosphate
  modified_base 20: mod_base = OTHER; note = 2'-O-methylcytidine-3'-phosphate
  modified_base 21: mod_base = OTHER; note = 2'-O-methyluridine-3'-phosphorothioate
  modified_base 22: mod_base = OTHER; note = 2'-O-methylguanosine-3'-phosphorothioate
  modified_base 23: mod_base = OTHER; note = 2'-O-methyluridine
tgtttatagagcaagaacactgt

SEQ ID NO: 202 - RNA, 23 nt, synthetic construct
  source 1..23: mol_type = other RNA
  modified_base 1: mod_base = OTHER; note = 2'-O-methyluridine-3'-phosphorothioate
  modified_base 2: mod_base = OTHER; note = 2'-deoxy-2'-fluoroguanosine-3'-phosphorothioate
  modified_base 3: mod_base = OTHER; note = 2'-O-methyluridine-3'-phosphate
  modified_base 4: mod_base = OTHER; note = 2'-O-methyluridine-3'-phosphate
  modified_base 5: mod_base = OTHER; note = 2'-O-methyluridine-3'-phosphate
  modified_base 6: mod_base = OTHER; note = 2'-O-methyladenosine-3'-phosphate
  modified_base 7: mod_base = OTHER; note 2-(1R-(uracil-1-yl)-2-hydroxyethoxy)-1,3-dihydroxy-2-methox ypropane 1-phosphate
  modified_base 8: mod_base = OTHER; note = 2'-O-methyladenosine-3'-phosphate
  modified_base 9: mod_base = OTHER; note = 2'-O-methylguanosine-3'-phosphate
  modified_base 10: mod_base = OTHER; note = 2'-O-methyladenosine-3'-phosphate
  modified_base 11: mod_base = OTHER; note = 2'-O-methylguanosine-3'-phosphate
  modified_base 12: mod_base = OTHER; note = 2'-O-methylcytidine-3'-phosphate
  modified_base 13: mod_base = OTHER; note = 2'-O-methyladenosine-3'-phosphate
  modified_base 14: mod_base = OTHER; note = 2'-deoxy-2'-fluoroadenosine-3'-phosphate
  modified_base 15: mod_base = OTHER; note = 2'-O-methylguanosine-3'-phosphate
  modified_base 16: mod_base = OTHER; note = 2'-deoxy-2'-fluoroadenosine-3'-phosphate
  modified_base 17: mod_base = OTHER; note = 2'-O-methyladenosine-3'-phosphate
  modified_base 18: mod_base = OTHER; note = 2'-O-methylcytidine-3'-phosphate
  modified_base 19: mod_base = OTHER; note = 2'-O-methyladenosine-3'-phosphate
  modified_base 20: mod_base = OTHER; note = 2'-O-methylcytidine-3'-phosphate
  modified_base 21: mod_base = OTHER; note = 2'-O-methyluridine-3'-phosphorothioate
  modified_base 22: mod_base = OTHER; note = 2'-O-methylguanosine-3'-phosphorothioate
  modified_base 23: mod_base = OTHER; note = 2'-O-methyluridine
tgtttatagagcaagaacactgt

SEQ ID NO: 203 - RNA, 12 nt, synthetic construct
  source 1..12: mol_type = other RNA
  modified_base 6: mod_base = OTHER; note = 1-deoxy-1-(thymin-1-yl)-alpha-L-threofuranose 2-phosphate
tacagtctatgt

SEQ ID NO: 204 - DNA, 12 bp, synthetic construct
  source 1..12: mol_type = other DNA
  modified_base 6: mod_base = OTHER; note = 1-deoxy-1-(thymin-1-yl)-alpha-L-threofuranose 2-phosphate
  misc_feature 6: note = RNA
  misc_feature 1..5: note = DNA
tacagtctatgt

SEQ ID NO: 205 - RNA, 12 nt, synthetic construct
  source 1..12: mol_type = other RNA
  modified_base 7: mod_base = OTHER; note 1-deoxy-1-(5-methylcytosin-1-yl)-alpha-L-threofuranose 2-phosphate
tacagtctatgt

SEQ ID NO: 206 - RNA, 12 nt, synthetic construct
  source 1..12: mol_type = other RNA
  modified_base 6: mod_base = OTHER; note = 1-deoxy-1-(guanin-9-yl)-alpha-L-threofuranose 2-phosphate
acatagactgta

SEQ ID NO: 207 - RNA, 12 nt, synthetic construct
  source 1..12: mol_type = other RNA
  modified_base 7: mod_base = OTHER; note = 1-deoxy-1-(adenin-9-yl)-alpha-L-threofuranose 2-phosphate
acatagactgta

SEQ ID NO: 208 - DNA, 12 bp, synthetic construct
  source 1..12: mol_type = other DNA
  modified_base 6: mod_base = OTHER; note = 1-deoxy-1-(guanin-9-yl)-alpha-L-threofuranose 2-phosphate
  misc_feature 6: note = RNA
  misc_feature 1..5: note = DNA
acatagactgta

SEQ ID NO: 209 - DNA, 12 bp, synthetic construct
  source 1..12: mol_type = other DNA
  modified_base 7: mod_base = OTHER; note = 1-deoxy-1-(adenin-9-yl)-alpha-L-threofuranose 2-phosphate
  misc_feature 7: note = RNA
  misc_feature 1..6: note = DNA
acatagactgta

SEQ ID NO: 210 - DNA, 12 bp, synthetic construct
  source 1..12: mol_type = other DNA
  modified_base 7: mod_base = OTHER; note 1-deoxy-1-(5-methylcytosin-1-yl)-alpha-L-threofuranose 2-phosphate
  misc_feature 7: note = RNA
  misc_feature 1..6: note = DNA
tacagtctatgt

SEQ ID NO: 211 - DNA, 20 bp, synthetic construct
  source 1..20: mol_type = other DNA
  modified_base 19: mod_base = OTHER; note = 1-deoxy-1-(thymin-1-yl)-alpha-L-threofuranose 2-phosphorothioate
  modified_base 20: mod_base = OTHER; note = 1-deoxy-1-(thymin-1-yl)-alpha-L-threofuranose
  misc_feature 19..20: note = RNA
  misc_feature 1..18: note = DNA
tttttttttttttttttttt

SEQ ID NO: 212 - DNA, 20 bp, synthetic construct
  source 1..20: mol_type = other DNA
  modified_base 19: mod_base = OTHER; note = 1-deoxy-1-(thymin-1-yl)-alpha-L-threofuranose 2-phosphate
  modified_base 20: mod_base = OTHER; note = 1-deoxy-1-(thymin-1-yl)-alpha-L-threofuranose
  misc_feature 19..20: note = RNA
  misc_feature 1..18: note = DNA
tttttttttttttttttttt

SEQ ID NO: 213 - DNA, 20 bp, synthetic construct
  source 1..20: mol_type = other DNA
  modified_base 20: mod_base = OTHER; note = 1-deoxy-1-(thymin-1-yl)-alpha-L-threofuranose
  misc_feature 20: note = RNA
  misc_feature 1..19: note = DNA
tttttttttttttttttttt

SEQ ID NO: 214 - DNA, 20 bp, synthetic construct
  source 1..20: mol_type = other DNA
  modified_base 19: mod_base = OTHER; note = 2'-deoxythymidine-3'-phosphorothioate
  modified_base 20: mod_base = OTHER; note = 1-deoxy-1-(thymin-1-yl)-alpha-L-threofuranose
  misc_feature 20: note = RNA
  misc_feature 1..19: note = DNA
tttttttttttttttttttt

SEQ ID NO: 215 - DNA, 20 bp, synthetic construct
  source 1..20: mol_type = other DNA
  modified_base 1: mod_base = OTHER; note = 1-deoxy-1-(thymin-1-yl)-alpha-L-threofuranose 2-phosphate
  misc_feature 1: note = RNA
  misc_feature 2..20: note = DNA
tttttttttttttttttttt

SEQ ID NO: 216 - DNA, 20 bp, synthetic construct
  source 1..20: mol_type = other DNA
  modified_base 1: mod_base = OTHER; note = 1-deoxy-1-(thymin-1-yl)-alpha-L-threofuranose 2-phosphorothioate
  misc_feature 1: note = RNA
  misc_feature 2..20: note = DNA
tttttttttttttttttttt

SEQ ID NO: 217 - RNA, 21 nt, synthetic construct
  source 1..21: mol_type = other RNA
  modified_base 1: mod_base = OTHER; note = 1-deoxy-1-(adenin-9-yl)-alpha-L-threofuranose 2-phosphorothioate
  modified_base 2: mod_base = OTHER; note = 2'-O-methyladenosine-3'-phosphorothioate
  modified_base 3: mod_base = OTHER; note = 2'-deoxy-2'-fluorocytidine-3'-phosphate
  modified_base 4: mod_base = OTHER; note = 2'-O-methyladenosine-3'-phosphate
  modified_base 5: mod_base = OTHER; note = 2'-deoxy-2'-fluoroguanosine-3'-phosphate
  modified_base 6: mod_base = OTHER; note = 2'-O-methyluridine-3'-phosphate
  modified_base 7: mod_base = OTHER; note = 2'-deoxy-2'-fluoroguanosine-3'-phosphate
  modified_base 8: mod_base = OTHER; note = 2'-O-methyluridine-3'-phosphate
  modified_base 9: mod_base = OTHER; note = 2'-deoxy-2'-fluorouridine-3'-phosphate
  modified_base 10: mod_base = OTHER; note = 2'-deoxy-2'-fluorocytidine-3'-phosphate
  modified_base 11: mod_base = OTHER; note = 2'-deoxy-2'-fluorouridine-3'-phosphate
  modified_base 12: mod_base = OTHER; note = 2'-O-methyluridine-3'-phosphate
  modified_base 13: mod_base = OTHER; note = 2'-deoxy-2'-fluoroguanosine-3'-phosphate
  modified_base 14: mod_base = OTHER; note = 2'-O-methylcytidine-3'-phosphate
  modified_base 15: mod_base = OTHER; note = 2'-deoxy-2'-fluorouridine-3'-phosphate
  modified_base 16: mod_base = OTHER; note = 2'-O-methylcytidine-3'-phosphate
  modified_base 17: mod_base = OTHER; note = 2'-deoxy-2'-fluorouridine-3'-phosphate
  modified_base 18: mod_base = OTHER; note = 2'-O-methyladenosine-3'-phosphate
  modified_base 19: mod_base = OTHER; note = 2'-deoxy-2'-fluorouridine-3'-phosphate
  modified_base 20: mod_base = OTHER; note = 2'-O-methyladenosine-3'-phosphate
  modified_base 21: mod_base = OTHER; note = 2'-deoxy-2'-fluoroadenosine-3'-phosphate conjugated at the 3'-end to an L96 ligand
aacagtgttcttgctctataa

SEQ ID NO: 218 - RNA, 21 nt, synthetic construct
  source 1..21: mol_type = other RNA
  modified_base 1: mod_base = OTHER; note = 2'-deoxy-2'-fluoroadenosine-3'-phosphorothioate
  modified_base 2: mod_base = OTHER; note = 1-deoxy-1-(adenin-9-yl)-alpha-L-threofuranose 2-phosphorothioate
  modified_base 3: mod_base = OTHER; note = 2'-deoxy-2'-fluorocytidine-3'-phosphate
  modified_base 4: mod_base = OTHER; note = 2'-O-methyladenosine-3'-phosphate
  modified_base 5: mod_base = OTHER; note = 2'-deoxy-2'-fluoroguanosine-3'-phosphate
  modified_base 6: mod_base = OTHER; note = 2'-O-methyluridine-3'-phosphate
  modified_base 7: mod_base = OTHER; note = 2'-deoxy-2'-fluoroguanosine-3'-phosphate
  modified_base 8: mod_base = OTHER; note = 2'-O-methyluridine-3'-phosphate
  modified_base 9: mod_base = OTHER; note = 2'-deoxy-2'-fluorouridine-3'-phosphate
  modified_base 10: mod_base = OTHER; note = 2'-deoxy-2'-fluorocytidine-3'-phosphate
  modified_base 11: mod_base = OTHER; note = 2'-deoxy-2'-fluorouridine-3'-phosphate
  modified_base 12: mod_base = OTHER; note = 2'-O-methyluridine-3'-phosphate
  modified_base 13: mod_base = OTHER; note = 2'-deoxy-2'-fluoroguanosine-3'-phosphate
  modified_base 14: mod_base = OTHER; note = 2'-O-methylcytidine-3'-phosphate
  modified_base 15: mod_base = OTHER; note = 2'-deoxy-2'-fluorouridine-3'-phosphate
  modified_base 16: mod_base = OTHER; note = 2'-O-methylcytidine-3'-phosphate
  modified_base 17: mod_base = OTHER; note = 2'-deoxy-2'-fluorouridine-3'-phosphate
  modified_base 18: mod_base = OTHER; note = 2'-O-methyladenosine-3'-phosphate
  modified_base 19: mod_base = OTHER; note = 2'-deoxy-2'-fluorouridine-3'-phosphate
  modified_base 20: mod_base = OTHER; note = 2'-O-methyladenosine-3'-phosphate
  modified_base 21: mod_base = OTHER; note = 2'-deoxy-2'-fluoroadenosine-3'-phosphate conjugated at the 3'-end to an L96 ligand
aacagtgttcttgctctataa

SEQ ID NO: 219 - RNA, 21 nt, synthetic construct
  source 1..21: mol_type = other RNA
  modified_base 1: mod_base = OTHER; note = 2'-deoxy-2'-fluoroadenosine-3'-phosphorothioate
  modified_base 2: mod_base = OTHER; note = 2'-O-methyladenosine-3'-phosphorothioate
  modified_base 3: mod_base = OTHER; note 1-deoxy-1-(5-methylcytosin-1-yl)-alpha-L-threofuranose 2-phosphate
  modified_base 4: mod_base = OTHER; note = 2'-O-methyladenosine-3'-phosphate
  modified_base 5: mod_base = OTHER; note = 2'-deoxy-2'-fluoroguanosine-3'-phosphate
  modified_base 6: mod_base = OTHER; note = 2'-O-methyluridine-3'-phosphate
  modified_base 7: mod_base = OTHER; note = 2'-deoxy-2'-fluoroguanosine-3'-phosphate
  modified_base 8: mod_base = OTHER; note = 2'-O-methyluridine-3'-phosphate
  modified_base 9: mod_base = OTHER; note = 2'-deoxy-2'-fluorouridine-3'-phosphate
  modified_base 10: mod_base = OTHER; note = 2'-deoxy-2'-fluorocytidine-3'-phosphate
  modified_base 11: mod_base = OTHER; note = 2'-deoxy-2'-fluorouridine-3'-phosphate
  modified_base 12: mod_base = OTHER; note = 2'-O-methyluridine-3'-phosphate
  modified_base 13: mod_base = OTHER; note = 2'-deoxy-2'-fluoroguanosine-3'-phosphate
  modified_base 14: mod_base = OTHER; note = 2'-O-methylcytidine-3'-phosphate
  modified_base 15: mod_base = OTHER; note = 2'-deoxy-2'-fluorouridine-3'-phosphate
  modified_base 16: mod_base = OTHER; note = 2'-O-methylcytidine-3'-phosphate
  modified_base 17: mod_base = OTHER; note = 2'-deoxy-2'-fluorouridine-3'-phosphate
  modified_base 18: mod_base = OTHER; note = 2'-O-methyladenosine-3'-phosphate
  modified_base 19: mod_base = OTHER; note = 2'-deoxy-2'-fluorouridine-3'-phosphate
  modified_base 20: mod_base = OTHER; note = 2'-O-methyladenosine-3'-phosphate
  modified_base 21: mod_base = OTHER; note = 2'-deoxy-2'-fluoroadenosine-3'-phosphate conjugated at the 3'-end to an L96 ligand
aacagtgttcttgctctataa

SEQ ID NO: 220 - RNA, 21 nt, synthetic construct
  source 1..21: mol_type = other RNA
  modified_base 1: mod_base = OTHER; note = 2'-deoxy-2'-fluoroadenosine-3'-phosphorothioate
  modified_base 2: mod_base = OTHER; note = 2'-O-methyladenosine-3'-phosphorothioate
  modified_base 3: mod_base = OTHER; note = 2'-deoxy-2'-fluorocytidine-3'-phosphate
  modified_base 4: mod_base = OTHER; note = 1-deoxy-1-(adenin-9-yl)-alpha-L-threofuranose 2-phosphate
  modified_base 5: mod_base = OTHER; note = 2'-deoxy-2'-fluoroguanosine-3'-phosphate
  modified_base 6: mod_base = OTHER; note = 2'-O-methyluridine-3'-phosphate
  modified_base 7: mod_base = OTHER; note = 2'-deoxy-2'-fluoroguanosine-3'-phosphate
  modified_base 8: mod_base = OTHER; note = 2'-O-methyluridine-3'-phosphate
  modified_base 9: mod_base = OTHER; note = 2'-deoxy-2'-fluorouridine-3'-phosphate
  modified_base 10: mod_base = OTHER; note = 2'-deoxy-2'-fluorocytidine-3'-phosphate
  modified_base 11: mod_base = OTHER; note = 2'-deoxy-2'-fluorouridine-3'-phosphate
  modified_base 12: mod_base = OTHER; note = 2'-O-methyluridine-3'-phosphate
  modified_base 13: mod_base = OTHER; note = 2'-deoxy-2'-fluoroguanosine-3'-phosphate
  modified_base 14: mod_base = OTHER; note = 2'-O-methylcytidine-3'-phosphate
  modified_base 15: mod_base = OTHER; note = 2'-deoxy-2'-fluorouridine-3'-phosphate
  modified_base 16: mod_base = OTHER; note = 2'-O-methylcytidine-3'-phosphate
  modified_base 17: mod_base = OTHER; note = 2'-deoxy-2'-fluorouridine-3'-phosphate
  modified_base 18: mod_base = OTHER; note = 2'-O-methyladenosine-3'-phosphate
  modified_base 19: mod_base = OTHER; note = 2'-deoxy-2'-fluorouridine-3'-phosphate
  modified_base 20: mod_base = OTHER; note = 2'-O-methyladenosine-3'-phosphate
  modified_base 21: mod_base = OTHER; note = 2'-deoxy-2'-fluoroadenosine-3'-phosphate conjugated at the 3'-end to an L96 ligand
aacagtgttcttgctctataa

SEQ ID NO: 221 - RNA, 21 nt, synthetic construct
  source 1..21: mol_type = other RNA
  modified_base 1: mod_base = OTHER; note = 2'-deoxy-2'-fluoroadenosine-3'-phosphorothioate
  modified_base 2: mod_base = OTHER; note = 2'-O-methyladenosine-3'-phosphorothioate
  modified_base 3: mod_base = OTHER; note = 2'-deoxy-2'-fluorocytidine-3'-phosphate
  modified_base 4: mod_base = OTHER; note = 2'-O-methyladenosine-3'-phosphate
  modified_base 5: mod_base = OTHER; note = 1-deoxy-1-(guanin-9-yl)-alpha-L-threofuranose 2-phosphate
  modified_base 6: mod_base = OTHER; note = 2'-O-methyluridine-3'-phosphate
  modified_base 7: mod_base = OTHER; note = 2'-deoxy-2'-fluoroguanosine-3'-phosphate
  modified_base 8: mod_base = OTHER; note = 2'-O-methyluridine-3'-phosphate
  modified_base 9: mod_base = OTHER; note = 2'-deoxy-2'-fluorouridine-3'-phosphate
  modified_base 10: mod_base = OTHER; note = 2'-deoxy-2'-fluorocytidine-3'-phosphate
  modified_base 11: mod_base = OTHER; note = 2'-deoxy-2'-fluorouridine-3'-phosphate
  modified_base 12: mod_base = OTHER; note = 2'-O-methyluridine-3'-phosphate
  modified_base 13: mod_base = OTHER; note = 2'-deoxy-2'-fluoroguanosine-3'-phosphate
  modified_base 14: mod_base = OTHER; note = 2'-O-methylcytidine-3'-phosphate
  modified_base 15: mod_base = OTHER; note = 2'-deoxy-2'-fluorouridine-3'-phosphate
  modified_base 16: mod_base = OTHER; note = 2'-O-methylcytidine-3'-phosphate
  modified_base 17: mod_base = OTHER; note = 2'-deoxy-2'-fluorouridine-3'-phosphate
  modified_base 18: mod_base = OTHER; note = 2'-O-methyladenosine-3'-phosphate
  modified_base 19: mod_base = OTHER; note = 2'-deoxy-2'-fluorouridine-3'-phosphate
  modified_base 20: mod_base = OTHER; note = 2'-O-methyladenosine-3'-phosphate
  modified_base 21: mod_base = OTHER; note = 2'-deoxy-2'-fluoroadenosine-3'-phosphate conjugated at the 3'-end to an L96 ligand
aacagtgttcttgctctataa

SEQ ID NO: 222 - RNA, 21 nt, synthetic construct
  source 1..21: mol_type = other RNA
  modified_base 1: mod_base = OTHER; note = 2'-deoxy-2'-fluoroadenosine-3'-phosphorothioate
  modified_base 2: mod_base = OTHER; note = 2'-O-methyladenosine-3'-phosphorothioate
  modified_base 3: mod_base = OTHER; note = 2'-deoxy-2'-fluorocytidine-3'-phosphate
  modified_base 4: mod_base = OTHER; note = 2'-O-methyladenosine-3'-phosphate
  modified_base 5: mod_base = OTHER; note = 2'-deoxy-2'-fluoroguanosine-3'-phosphate
  modified_base 6: mod_base = OTHER; note = 1-deoxy-1-(thymin-1-yl)-alpha-L-threofuranose 2-phosphate
  modified_base 7: mod_base = OTHER; note = 2'-deoxy-2'-fluoroguanosine-3'-phosphate
  modified_base 8: mod_base = OTHER; note = 2'-O-methyluridine-3'-phosphate
  modified_base 9: mod_base = OTHER; note = 2'-deoxy-2'-fluorouridine-3'-phosphate
  modified_base 10: mod_base = OTHER; note = 2'-deoxy-2'-fluorocytidine-3'-phosphate
  modified_base 11: mod_base = OTHER; note = 2'-deoxy-2'-fluorouridine-3'-phosphate
  modified_base 12: mod_base = OTHER; note = 2'-O-methyluridine-3'-phosphate
  modified_base 13: mod_base = OTHER; note = 2'-deoxy-2'-fluoroguanosine-3'-phosphate
  modified_base 14: mod_base = OTHER; note = 2'-O-methylcytidine-3'-phosphate
  modified_base 15: mod_base = OTHER; note = 2'-deoxy-2'-fluorouridine-3'-phosphate
  modified_base 16: mod_base = OTHER; note = 2'-O-methylcytidine-3'-phosphate
  modified_base 17: mod_base = OTHER; note = 2'-deoxy-2'-fluorouridine-3'-phosphate
  modified_base 18: mod_base = OTHER; note = 2'-O-methyladenosine-3'-phosphate
  modified_base 19: mod_base = OTHER; note = 2'-deoxy-2'-fluorouridine-3'-phosphate
  modified_base 20: mod_base = OTHER; note = 2'-O-methyladenosine-3'-phosphate
  modified_base 21: mod_base = OTHER; note = 2'-deoxy-2'-fluoroadenosine-3'-phosphate conjugated at the 3'-end to an L96 ligand
aacagtgttcttgctctataa

SEQ ID NO: 223 - RNA, 21 nt, synthetic construct
  source 1..21: mol_type = other RNA
  modified_base 1: mod_base = OTHER; note = 2'-deoxy-2'-fluoroadenosine-3'-phosphorothioate
  modified_base 2: mod_base = OTHER; note = 2'-O-methyladenosine-3'-phosphorothioate
  modified_base 3: mod_base = OTHER; note = 2'-deoxy-2'-fluorocytidine-3'-phosphate
  modified_base 4: mod_base = OTHER; note = 2'-O-methyladenosine-3'-phosphate
  modified_base 5: mod_base = OTHER; note = 2'-deoxy-2'-fluoroguanosine-3'-phosphate
  modified_base 6: mod_base = OTHER; note = 2'-O-methyluridine-3'-phosphate
  modified_base 7: mod_base = OTHER; note = 1-deoxy-1-(guanin-9-yl)-alpha-L-threofuranose 2-phosphate
  modified_base 8: mod_base = OTHER; note = 2'-O-methyluridine-3'-phosphate
  modified_base 9: mod_base = OTHER; note = 2'-deoxy-2'-fluorouridine-3'-phosphate
  modified_base 10: mod_base = OTHER; note = 2'-deoxy-2'-fluorocytidine-3'-phosphate
  modified_base 11: mod_base = OTHER; note = 2'-deoxy-2'-fluorouridine-3'-phosphate
  modified_base 12: mod_base = OTHER; note = 2'-O-methyluridine-3'-phosphate
  modified_base 13: mod_base = OTHER; note = 2'-deoxy-2'-fluoroguanosine-3'-phosphate
  modified_base 14: mod_base = OTHER; note = 2'-O-methylcytidine-3'-phosphate
  modified_base 15: mod_base = OTHER; note = 2'-deoxy-2'-fluorouridine-3'-phosphate
  modified_base 16: mod_base = OTHER; note = 2'-O-methylcytidine-3'-phosphate
  modified_base 17: mod_base = OTHER; note = 2'-deoxy-2'-fluorouridine-3'-phosphate
  modified_base 18: mod_base = OTHER; note = 2'-O-methyladenosine-3'-phosphate
  modified_base 19: mod_base = OTHER; note = 2'-deoxy-2'-fluorouridine-3'-phosphate
  modified_base 20: mod_base = OTHER; note = 2'-O-methyladenosine-3'-phosphate
  modified_base 21: mod_base = OTHER; note = 2'-deoxy-2'-fluoroadenosine-3'-phosphate conjugated at the 3'-end to an L96 ligand
aacagtgttcttgctctataa

SEQ ID NO: 224 - RNA, 21 nt, synthetic construct
  source 1..21: mol_type = other RNA
  modified_base 1: mod_base = OTHER; note = 2'-deoxy-2'-fluoroadenosine-3'-phosphorothioate
  modified_base 2: mod_base = OTHER; note = 2'-O-methyladenosine-3'-phosphorothioate
  modified_base 3: mod_base = OTHER; note = 2'-deoxy-2'-fluorocytidine-3'-phosphate
  modified_base 4: mod_base = OTHER; note = 2'-O-methyladenosine-3'-phosphate
  modified_base 5: mod_base = OTHER; note = 2'-deoxy-2'-fluoroguanosine-3'-phosphate
  modified_base 6: mod_base = OTHER; note = 2'-O-methyluridine-3'-phosphate
  modified_base 7: mod_base = OTHER; note = 2'-deoxy-2'-fluoroguanosine-3'-phosphate
  modified_base 8: mod_base = OTHER; note = 1-deoxy-1-(thymin-1-yl)-alpha-L-threofuranose 2-phosphate
  modified_base 9: mod_base = OTHER; note = 2'-deoxy-2'-fluorouridine-3'-phosphate
  modified_base 10: mod_base = OTHER; note = 2'-deoxy-2'-fluorocytidine-3'-phosphate
  modified_base 11: mod_base = OTHER; note = 2'-deoxy-2'-fluorouridine-3'-phosphate
  modified_base 12: mod_base = OTHER; note = 2'-O-methyluridine-3'-phosphate
  modified_base 13: mod_base = OTHER; note = 2'-deoxy-2'-fluoroguanosine-3'-phosphate
  modified_base 14: mod_base = OTHER; note = 2'-O-methylcytidine-3'-phosphate
  modified_base 15: mod_base = OTHER; note = 2'-deoxy-2'-fluorouridine-3'-phosphate
  modified_base 16: mod_base = OTHER; note = 2'-O-methylcytidine-3'-phosphate
  modified_base 17: mod_base = OTHER; note = 2'-deoxy-2'-fluorouridine-3'-phosphate
  modified_base 18: mod_base = OTHER; note = 2'-O-methyladenosine-3'-phosphate
  modified_base 19: mod_base = OTHER; note = 2'-deoxy-2'-fluorouridine-3'-phosphate
  modified_base 20: mod_base = OTHER; note = 2'-O-methyladenosine-3'-phosphate
  modified_base 21: mod_base = OTHER; note = 2'-deoxy-2'-fluoroadenosine-3'-phosphate conjugated at the 3'-end to an L96 ligand
aacagtgttcttgctctataa

SEQ ID NO: 225 - RNA, 21 nt, synthetic construct
  source 1..21: mol_type = other RNA
  modified_base 1: mod_base = OTHER; note = 2'-deoxy-2'-fluoroadenosine-3'-phosphorothioate
  modified_base 2: mod_base = OTHER; note = 2'-O-methyladenosine-3'-phosphorothioate
  modified_base 3: mod_base = OTHER; note = 2'-deoxy-2'-fluorocytidine-3'-phosphate
  modified_base 4: mod_base = OTHER; note = 2'-O-methyladenosine-3'-phosphate
  modified_base 5: mod_base = OTHER; note = 2'-deoxy-2'-fluoroguanosine-3'-phosphate
  modified_base 6: mod_base = OTHER; note = 2'-O-methyluridine-3'-phosphate
  modified_base 7: mod_base = OTHER; note = 2'-deoxy-2'-fluoroguanosine-3'-phosphate
  modified_base 8: mod_base = OTHER; note = 2'-O-methyluridine-3'-phosphate
  modified_base 9: mod_base = OTHER; note = 1-deoxy-1-(thymin-1-yl)-alpha-L-threofuranose 2-phosphate
  modified_base 10: mod_base = OTHER; note = 2'-deoxy-2'-fluorocytidine-3'-phosphate
  modified_base 11: mod_base = OTHER; note = 2'-deoxy-2'-fluorouridine-3'-phosphate
  modified_base 12: mod_base = OTHER; note = 2'-O-methyluridine-3'-phosphate
  modified_base 13: mod_base = OTHER; note = 2'-deoxy-2'-fluoroguanosine-3'-phosphate
  modified_base 14: mod_base = OTHER; note = 2'-O-methylcytidine-3'-phosphate
  modified_base 15: mod_base = OTHER; note = 2'-deoxy-2'-fluorouridine-3'-phosphate
  modified_base 16: mod_base = OTHER; note = 2'-O-methylcytidine-3'-phosphate
  modified_base 17: mod_base = OTHER; note = 2'-deoxy-2'-fluorouridine-3'-phosphate
  modified_base 18: mod_base = OTHER; note = 2'-O-methyladenosine-3'-phosphate
  modified_base 19: mod_base = OTHER; note = 2'-deoxy-2'-fluorouridine-3'-phosphate
  modified_base 20: mod_base = OTHER; note = 2'-O-methyladenosine-3'-phosphate
  modified_base 21: mod_base = OTHER; note = 2'-deoxy-2'-fluoroadenosine-3'-phosphate conjugated at the 3'-end to an L96 ligand
aacagtgttcttgctctataa

SEQ ID NO: 226 - RNA, 21 nt, synthetic construct
  source 1..21: mol_type = other RNA
  modified_base 1: mod_base = OTHER; note = 2'-deoxy-2'-fluoroadenosine-3'-phosphorothioate
  modified_base 2: mod_base = OTHER; note = 2'-O-methyladenosine-3'-phosphorothioate
  modified_base 3: mod_base = OTHER; note = 2'-deoxy-2'-fluorocytidine-3'-phosphate
  modified_base 4: mod_base = OTHER; note = 2'-O-methyladenosine-3'-phosphate
  modified_base 5: mod_base = OTHER; note = 2'-deoxy-2'-fluoroguanosine-3'-phosphate
  modified_base 6: mod_base = OTHER; note = 2'-O-methyluridine-3'-phosphate
  modified_base 7: mod_base = OTHER; note = 2'-deoxy-2'-fluoroguanosine-3'-phosphate
  modified_base 8: mod_base = OTHER; note = 2'-O-methyluridine-3'-phosphate
  modified_base 9: mod_base = OTHER; note = 2'-deoxy-2'-fluorouridine-3'-phosphate
  modified_base 10: mod_base = OTHER; note 1-deoxy-1-(5-methylcytosin-1-yl)-alpha-L-threofuranose 2-phosphate
  modified_base 11: mod_base = OTHER; note = 2'-deoxy-2'-fluorouridine-3'-phosphate
  modified_base 12: mod_base = OTHER; note = 2'-O-methyluridine-3'-phosphate
  modified_base 13: mod_base = OTHER; note = 2'-deoxy-2'-fluoroguanosine-3'-phosphate
  modified_base 14: mod_base = OTHER; note = 2'-O-methylcytidine-3'-phosphate
  modified_base 15: mod_base = OTHER; note = 2'-deoxy-2'-fluorouridine-3'-phosphate
  modified_base 16: mod_base = OTHER; note = 2'-O-methylcytidine-3'-phosphate
  modified_base 17: mod_base = OTHER; note = 2'-deoxy-2'-fluorouridine-3'-phosphate
  modified_base 18: mod_base = OTHER; note = 2'-O-methyladenosine-3'-phosphate
  modified_base 19: mod_base = OTHER; note = 2'-deoxy-2'-fluorouridine-3'-phosphate
  modified_base 20: mod_base = OTHER; note = 2'-O-methyladenosine-3'-phosphate
  modified_base 21: mod_base = OTHER; note = 2'-deoxy-2'-fluoroadenosine-3'-phosphate conjugated at the 3'-end to an L96 ligand
aacagtgttcttgctctataa

SEQ ID NO: 227 - RNA, 21 nt, synthetic construct
  source 1..21: mol_type = other RNA
  modified_base 1: mod_base = OTHER; note = 2'-deoxy-2'-fluoroadenosine-3'-phosphorothioate
  modified_base 2: mod_base = OTHER; note = 2'-O-methyladenosine-3'-phosphorothioate
  modified_base 3: mod_base = OTHER; note = 2'-deoxy-2'-fluorocytidine-3'-phosphate
  modified_base 4: mod_base = OTHER; note = 2'-O-methyladenosine-3'-phosphate
  modified_base 5: mod_base = OTHER; note = 2'-deoxy-2'-fluoroguanosine-3'-phosphate
  modified_base 6: mod_base = OTHER; note = 2'-O-methyluridine-3'-phosphate
  modified_base 7: mod_base = OTHER; note = 2'-deoxy-2'-fluoroguanosine-3'-phosphate
  modified_base 8: mod_base = OTHER; note = 2'-O-methyluridine-3'-phosphate
  modified_base 9: mod_base = OTHER; note = 2'-deoxy-2'-fluorouridine-3'-phosphate
  modified_base 10: mod_base = OTHER; note = 2'-deoxy-2'-fluorocytidine-3'-phosphate
  modified_base 11: mod_base = OTHER; note = 1-deoxy-1-(thymin-1-yl)-alpha-L-threofuranose 2-phosphate
  modified_base 12: mod_base = OTHER; note = 2'-O-methyluridine-3'-phosphate
  modified_base 13: mod_base = OTHER; note = 2'-deoxy-2'-fluoroguanosine-3'-phosphate
  modified_base 14: mod_base = OTHER; note = 2'-O-methylcytidine-3'-phosphate
  modified_base 15: mod_base = OTHER; note = 2'-deoxy-2'-fluorouridine-3'-phosphate
  modified_base 16: mod_base = OTHER; note = 2'-O-methylcytidine-3'-phosphate
  modified_base 17: mod_base = OTHER; note = 2'-deoxy-2'-fluorouridine-3'-phosphate
  modified_base 18: mod_base = OTHER; note = 2'-O-methyladenosine-3'-phosphate
  modified_base 19: mod_base = OTHER; note = 2'-deoxy-2'-fluorouridine-3'-phosphate
  modified_base 20: mod_base = OTHER; note = 2'-O-methyladenosine-3'-phosphate
  modified_base 21: mod_base = OTHER; note = 2'-deoxy-2'-fluoroadenosine-3'-phosphate conjugated at the 3'-end to an L96 ligand
aacagtgttcttgctctataa

SEQ ID NO: 228 - RNA, 21 nt, synthetic construct
  source 1..21: mol_type = other RNA
  modified_base 1: mod_base = OTHER; note = 2'-deoxy-2'-fluoroadenosine-3'-phosphorothioate
  modified_base 2: mod_base = OTHER; note = 2'-O-methyladenosine-3'-phosphorothioate
  modified_base 3: mod_base = OTHER; note = 2'-deoxy-2'-fluorocytidine-3'-phosphate
  modified_base 4: mod_base = OTHER; note = 2'-O-methyladenosine-3'-phosphate
  modified_base 5: mod_base = OTHER; note = 2'-deoxy-2'-fluoroguanosine-3'-phosphate
  modified_base 6: mod_base = OTHER; note = 2'-O-methyluridine-3'-phosphate
  modified_base 7: mod_base = OTHER; note = 2'-deoxy-2'-fluoroguanosine-3'-phosphate
  modified_base 8: mod_base = OTHER; note = 2'-O-methyluridine-3'-phosphate
  modified_base 9: mod_base = OTHER; note = 2'-deoxy-2'-fluorouridine-3'-phosphate
  modified_base 10: mod_base = OTHER; note = 2'-deoxy-2'-fluorocytidine-3'-phosphate
  modified_base 11: mod_base = OTHER; note = 2'-deoxy-2'-fluorouridine-3'-phosphate
  modified_base 12: mod_base = OTHER; note = 1-deoxy-1-(thymin-1-yl)-alpha-L-threofuranose 2-phosphate
  modified_base 13: mod_base = OTHER; note = 2'-deoxy-2'-fluoroguanosine-3'-phosphate
  modified_base 14: mod_base = OTHER; note = 2'-O-methylcytidine-3'-phosphate
  modified_base 15: mod_base = OTHER; note = 2'-deoxy-2'-fluorouridine-3'-phosphate
  modified_base 16: mod_base = OTHER; note = 2'-O-methylcytidine-3'-phosphate
  modified_base 17: mod_base = OTHER; note = 2'-deoxy-2'-fluorouridine-3'-phosphate
  modified_base 18: mod_base = OTHER; note = 2'-O-methyladenosine-3'-phosphate
  modified_base 19: mod_base = OTHER; note = 2'-deoxy-2'-fluorouridine-3'-phosphate
  modified_base 20: mod_base = OTHER; note = 2'-O-methyladenosine-3'-phosphate
  modified_base 21: mod_base = OTHER; note = 2'-deoxy-2'-fluoroadenosine-3'-phosphate conjugated at the 3'-end to an L96 ligand
aacagtgttcttgctctataa

SEQ ID NO: 229 - RNA, 21 nt, synthetic construct
  source 1..21: mol_type = other RNA
  modified_base 1: mod_base = OTHER; note = 2'-deoxy-2'-fluoroadenosine-3'-phosphorothioate
  modified_base 2: mod_base = OTHER; note = 2'-O-methyladenosine-3'-phosphorothioate
  modified_base 3: mod_base = OTHER; note = 2'-deoxy-2'-fluorocytidine-3'-phosphate
  modified_base 4: mod_base = OTHER; note = 2'-O-methyladenosine-3'-phosphate
  modified_base 5: mod_base = OTHER; note = 2'-deoxy-2'-fluoroguanosine-3'-phosphate
  modified_base 6: mod_base = OTHER; note = 2'-O-methyluridine-3'-phosphate
  modified_base 7: mod_base = OTHER; note = 2'-deoxy-2'-fluoroguanosine-3'-phosphate
  modified_base 8: mod_base = OTHER; note = 2'-O-methyluridine-3'-phosphate
  modified_base 9: mod_base = OTHER; note = 2'-deoxy-2'-fluorouridine-3'-phosphate
  modified_base 10: mod_base = OTHER; note = 2'-deoxy-2'-fluorocytidine-3'-phosphate
  modified_base 11: mod_base = OTHER; note = 2'-deoxy-2'-fluorouridine-3'-phosphate
  modified_base 12: mod_base = OTHER; note = 2'-O-methyluridine-3'-phosphate
  modified_base 13: mod_base = OTHER; note = 1-deoxy-1-(guanin-9-yl)-alpha-L-threofuranose 2-phosphate
  modified_base 14: mod_base = OTHER; note = 2'-O-methylcytidine-3'-phosphate
  modified_base 15: mod_base = OTHER; note = 2'-deoxy-2'-fluorouridine-3'-phosphate
  modified_base 16: mod_base = OTHER; note = 2'-O-methylcytidine-3'-phosphate
  modified_base 17: mod_base = OTHER; note = 2'-deoxy-2'-fluorouridine-3'-phosphate
  modified_base 18: mod_base = OTHER; note = 2'-O-methyladenosine-3'-phosphate
  modified_base 19: mod_base = OTHER; note = 2'-deoxy-2'-fluorouridine-3'-phosphate
  modified_base 20: mod_base = OTHER; note = 2'-O-methyladenosine-3'-phosphate
  modified_base 21: mod_base = OTHER; note = 2'-deoxy-2'-fluoroadenosine-3'-phosphate conjugated at the 3'-end to an L96 ligand
aacagtgttcttgctctataa

SEQ ID NO: 230 - RNA, 21 nt, synthetic construct
  source 1..21: mol_type = other RNA
  modified_base 1: mod_base = OTHER; note = 2'-deoxy-2'-fluoroadenosine-3'-phosphorothioate
  modified_base 2: mod_base = OTHER; note = 2'-O-methyladenosine-3'-phosphorothioate
  modified_base 3: mod_base = OTHER; note = 2'-deoxy-2'-fluorocytidine-3'-phosphate
  modified_base 4: mod_base = OTHER; note = 2'-O-methyladenosine-3'-phosphate
  modified_base 5: mod_base = OTHER; note = 2'-deoxy-2'-fluoroguanosine-3'-phosphate
  modified_base 6: mod_base = OTHER; note = 2'-O-methyluridine-3'-phosphate
  modified_base 7: mod_base = OTHER; note = 2'-deoxy-2'-fluoroguanosine-3'-phosphate
  modified_base 8: mod_base = OTHER; note = 2'-O-methyluridine-3'-phosphate
  modified_base 9: mod_base = OTHER; note = 2'-deoxy-2'-fluorouridine-3'-phosphate
  modified_base 10: mod_base = OTHER; note = 2'-deoxy-2'-fluorocytidine-3'-phosphate
  modified_base 11: mod_base = OTHER; note = 2'-deoxy-2'-fluorouridine-3'-phosphate
  modified_base 12: mod_base = OTHER; note = 2'-O-methyluridine-3'-phosphate
  modified_base 13: mod_base = OTHER; note = 2'-deoxy-2'-fluoroguanosine-3'-phosphate
  modified_base 14: mod_base = OTHER; note 1-deoxy-1-(5-methylcytosin-1-yl)-alpha-L-threofuranose 2-phosphate
  modified_base 15: mod_base = OTHER; note = 2'-deoxy-2'-fluorouridine-3'-phosphate
  modified_base 16: mod_base = OTHER; note = 2'-O-methylcytidine-3'-phosphate
  modified_base 17: mod_base = OTHER; note = 2'-deoxy-2'-fluorouridine-3'-phosphate
  modified_base 18: mod_base = OTHER; note = 2'-O-methyladenosine-3'-phosphate
  modified_base 19: mod_base = OTHER; note = 2'-deoxy-2'-fluorouridine-3'-phosphate
  modified_base 20: mod_base = OTHER; note = 2'-O-methyladenosine-3'-phosphate
  modified_base 21: mod_base = OTHER; note = 2'-deoxy-2'-fluoroadenosine-3'-phosphate conjugated at the 3'-end to an L96 ligand
aacagtgttcttgctctataa

SEQ ID NO: 231 - RNA, 21 nt, synthetic construct
  source 1..21: mol_type = other RNA
  modified_base 1: mod_base = OTHER; note = 2'-deoxy-2'-fluoroadenosine-3'-phosphorothioate
  modified_base 2: mod_base = OTHER; note = 2'-O-methyladenosine-3'-phosphorothioate
  modified_base 3: mod_base = OTHER; note = 2'-deoxy-2'-fluorocytidine-3'-phosphate
  modified_base 4: mod_base = OTHER; note = 2'-O-methyladenosine-3'-phosphate
  modified_base 5: mod_base = OTHER; note = 2'-deoxy-2'-fluoroguanosine-3'-phosphate
  modified_base 6: mod_base = OTHER; note = 2'-O-methyluridine-3'-phosphate
  modified_base 7: mod_base = OTHER; note = 2'-deoxy-2'-fluoroguanosine-3'-phosphate
  modified_base 8: mod_base = OTHER; note = 2'-O-methyluridine-3'-phosphate
  modified_base 9: mod_base = OTHER; note = 2'-deoxy-2'-fluorouridine-3'-phosphate
  modified_base 10: mod_base = OTHER; note = 2'-deoxy-2'-fluorocytidine-3'-phosphate
  modified_base 11: mod_base = OTHER; note = 2'-deoxy-2'-fluorouridine-3'-phosphate
  modified_base 12: mod_base = OTHER; note = 2'-O-methyluridine-3'-phosphate
  modified_base 13: mod_base = OTHER; note = 2'-deoxy-2'-fluoroguanosine-3'-phosphate
  modified_base 14: mod_base = OTHER; note = 2'-O-methylcytidine-3'-phosphate
  modified_base 15: mod_base = OTHER; note = 1-deoxy-1-(thymin-1-yl)-alpha-L-threofuranose 2-phosphate
  modified_base 16: mod_base = OTHER; note = 2'-O-methylcytidine-3'-phosphate
  modified_base 17: mod_base = OTHER; note = 2'-deoxy-2'-fluorouridine-3'-phosphate
  modified_base 18: mod_base = OTHER; note = 2'-O-methyladenosine-3'-phosphate
  modified_base 19: mod_base = OTHER; note = 2'-deoxy-2'-fluorouridine-3'-phosphate
  modified_base 20: mod_base = OTHER; note = 2'-O-methyladenosine-3'-phosphate
  modified_base 21: mod_base = OTHER; note = 2'-deoxy-2'-fluoroadenosine-3'-phosphate conjugated at the 3'-end to an L96 ligand
aacagtgttcttgctctataa

SEQ ID NO: 232 - RNA, 21 nt, synthetic construct
  source 1..21: mol_type = other RNA
  modified_base 1: mod_base = OTHER; note = 2'-deoxy-2'-fluoroadenosine-3'-phosphorothioate
  modified_base 2: mod_base = OTHER; note = 2'-O-methyladenosine-3'-phosphorothioate
  modified_base 3: mod_base = OTHER; note = 2'-deoxy-2'-fluorocytidine-3'-phosphate
  modified_base 4: mod_base = OTHER; note = 2'-O-methyladenosine-3'-phosphate
  modified_base 5: mod_base = OTHER; note = 2'-deoxy-2'-fluoroguanosine-3'-phosphate
  modified_base 6: mod_base = OTHER; note = 2'-O-methyluridine-3'-phosphate
  modified_base 7: mod_base = OTHER; note = 2'-deoxy-2'-fluoroguanosine-3'-phosphate
  modified_base 8: mod_base = OTHER; note = 2'-O-methyluridine-3'-phosphate
  modified_base 9: mod_base = OTHER; note = 2'-deoxy-2'-fluorouridine-3'-phosphate
  modified_base 10: mod_base = OTHER; note = 2'-deoxy-2'-fluorocytidine-3'-phosphate
  modified_base 11: mod_base = OTHER; note = 2'-deoxy-2'-fluorouridine-3'-phosphate
  modified_base 12: mod_base = OTHER; note = 2'-O-methyluridine-3'-phosphate
  modified_base 13: mod_base = OTHER; note = 2'-deoxy-2'-fluoroguanosine-3'-phosphate
  modified_base 14: mod_base = OTHER; note = 2'-O-methylcytidine-3'-phosphate
  modified_base 15: mod_base = OTHER; note = 2'-deoxy-2'-fluorouridine-3'-phosphate
  modified_base 16: mod_base = OTHER; note 1-deoxy-1-(5-methylcytosin-1-yl)-alpha-L-threofuranose 2-phosphate
  modified_base 17: mod_base = OTHER; note = 2'-deoxy-2'-fluorouridine-3'-phosphate
  modified_base 18: mod_base = OTHER; note = 2'-O-methyladenosine-3'-phosphate
  modified_base 19: mod_base = OTHER; note = 2'-deoxy-2'-fluorouridine-3'-phosphate
  modified_base 20: mod_base = OTHER; note = 2'-O-methyladenosine-3'-phosphate
  modified_base 21: mod_base = OTHER; note = 2'-deoxy-2'-fluoroadenosine-3'-phosphate conjugated at the 3'-end to an L96 ligand
aacagtgttcttgctctataa

SEQ ID NO: 233 - RNA, 21 nt, synthetic construct
  source 1..21: mol_type = other RNA
  modified_base 1: mod_base = OTHER; note = 2'-deoxy-2'-fluoroadenosine-3'-phosphorothioate
  modified_base 2: mod_base = OTHER; note = 2'-O-methyladenosine-3'-phosphorothioate
  modified_base 3: mod_base = OTHER; note = 2'-deoxy-2'-fluorocytidine-3'-phosphate
  modified_base 4: mod_base = OTHER; note = 2'-O-methyladenosine-3'-phosphate
  modified_base 5: mod_base = OTHER; note = 2'-deoxy-2'-fluoroguanosine-3'-phosphate
  modified_base 6: mod_base = OTHER; note = 2'-O-methyluridine-3'-phosphate
  modified_base 7: mod_base = OTHER; note = 2'-deoxy-2'-fluoroguanosine-3'-phosphate
  modified_base 8: mod_base = OTHER; note = 2'-O-methyluridine-3'-phosphate
  modified_base 9: mod_base = OTHER; note = 2'-deoxy-2'-fluorouridine-3'-phosphate
  modified_base 10: mod_base = OTHER; note = 2'-deoxy-2'-fluorocytidine-3'-phosphate
  modified_base 11: mod_base = OTHER; note = 2'-deoxy-2'-fluorouridine-3'-phosphate
  modified_base 12: mod_base = OTHER; note = 2'-O-methyluridine-3'-phosphate
  modified_base 13: mod_base = OTHER; note = 2'-deoxy-2'-fluoroguanosine-3'-phosphate
  modified_base 14: mod_base = OTHER; note = 2'-O-methylcytidine-3'-phosphate
  modified_base 15: mod_base = OTHER; note = 2'-deoxy-2'-fluorouridine-3'-phosphate
  modified_base 16: mod_base = OTHER; note = 2'-O-methylcytidine-3'-phosphate
  modified_base 17: mod_base = OTHER; note = 1-deoxy-1-(thymin-1-yl)-alpha-L-threofuranose 2-phosphate
  modified_base 18: mod_base = OTHER; note = 2'-O-methyladenosine-3'-phosphate
  modified_base 19: mod_base = OTHER; note = 2'-deoxy-2'-fluorouridine-3'-phosphate
  modified_base 20: mod_base = OTHER; note = 2'-O-methyladenosine-3'-phosphate
  modified_base 21: mod_base = OTHER; note = 2'-deoxy-2'-fluoroadenosine-3'-phosphate conjugated at the 3'-end to an L96 ligand
aacagtgttcttgctctataa

SEQ ID NO: 234 - RNA, 21 nt, synthetic construct
  source 1..21: mol_type = other RNA
  modified_base 1: mod_base = OTHER; note = 2'-deoxy-2'-fluoroadenosine-3'-phosphorothioate
  modified_base 2: mod_base = OTHER; note = 2'-O-methyladenosine-3'-phosphorothioate
  modified_base 3: mod_base = OTHER; note = 2'-deoxy-2'-fluorocytidine-3'-phosphate
  modified_base 4: mod_base = OTHER; note = 2'-O-methyladenosine-3'-phosphate
  modified_base 5: mod_base = OTHER; note = 2'-deoxy-2'-fluoroguanosine-3'-phosphate
  modified_base 6: mod_base = OTHER; note = 2'-O-methyluridine-3'-phosphate
  modified_base 7: mod_base = OTHER; note = 2'-deoxy-2'-fluoroguanosine-3'-phosphate
  modified_base 8: mod_base = OTHER; note = 2'-O-methyluridine-3'-phosphate
  modified_base 9: mod_base = OTHER; note = 2'-deoxy-2'-fluorouridine-3'-phosphate
  modified_base 10: mod_base = OTHER; note = 2'-deoxy-2'-fluorocytidine-3'-phosphate
  modified_base 11: mod_base = OTHER; note = 2'-deoxy-2'-fluorouridine-3'-phosphate
  modified_base 12: mod_base = OTHER; note = 2'-O-methyluridine-3'-phosphate
  modified_base 13: mod_base = OTHER; note = 2'-deoxy-2'-fluoroguanosine-3'-phosphate
  modified_base 14: mod_base = OTHER; note = 2'-O-methylcytidine-3'-phosphate
  modified_base 15: mod_base = OTHER; note = 2'-deoxy-2'-fluorouridine-3'-phosphate
  modified_base 16: mod_base = OTHER; note = 2'-O-methylcytidine-3'-phosphate
  modified_base 17: mod_base = OTHER; note = 2'-deoxy-2'-fluorouridine-3'-phosphate
  modified_base 18: mod_base = OTHER; note = 1-deoxy-1-(adenin-9-yl)-alpha-L-threofuranose 2-phosphate
  modified_base 19: mod_base = OTHER; note = 2'-deoxy-2'-fluorouridine-3'-phosphate
  modified_base 20: mod_base = OTHER; note = 2'-O-methyladenosine-3'-phosphate
  modified_base 21: mod_base = OTHER; note = 2'-deoxy-2'-fluoroadenosine-3'-phosphate conjugated at the 3'-end to an L96 ligand
aacagtgttcttgctctataa

SEQ ID NO: 235 - RNA, 21 nt, synthetic construct
  source 1..21: mol_type = other RNA
  modified_base 1: mod_base = OTHER; note = 2'-deoxy-2'-fluoroadenosine-3'-phosphorothioate
  modified_base 2: mod_base = OTHER; note = 2'-O-methyladenosine-3'-phosphorothioate
  modified_base 3: mod_base = OTHER; note = 2'-deoxy-2'-fluorocytidine-3'-phosphate
  modified_base 4: mod_base = OTHER; note = 2'-O-methyladenosine-3'-phosphate
  modified_base 5: mod_base = OTHER; note = 2'-deoxy-2'-fluoroguanosine-3'-phosphate
  modified_base 6: mod_base = OTHER; note = 2'-O-methyluridine-3'-phosphate
  modified_base 7: mod_base = OTHER; note = 2'-deoxy-2'-fluoroguanosine-3'-phosphate
  modified_base 8: mod_base = OTHER; note = 2'-O-methyluridine-3'-phosphate
  modified_base 9: mod_base = OTHER; note = 2'-deoxy-2'-fluorouridine-3'-phosphate
  modified_base 10: mod_base = OTHER; note = 2'-deoxy-2'-fluorocytidine-3'-phosphate
  modified_base 11: mod_base = OTHER; note = 2'-deoxy-2'-fluorouridine-3'-phosphate
  modified_base 12: mod_base = OTHER; note = 2'-O-methyluridine-3'-phosphate
  modified_base 13: mod_base = OTHER; note = 2'-deoxy-2'-fluoroguanosine-3'-phosphate
  modified_base 14: mod_base = OTHER; note = 2'-O-methylcytidine-3'-phosphate
  modified_base 15: mod_base = OTHER; note = 2'-deoxy-2'-fluorouridine-3'-phosphate
  modified_base 16: mod_base = OTHER; note = 2'-O-methylcytidine-3'-phosphate
  modified_base 17: mod_base = OTHER; note = 2'-deoxy-2'-fluorouridine-3'-phosphate
  modified_base 18: mod_base = OTHER; note = 2'-O-methyladenosine-3'-phosphate
  modified_base 19: mod_base = OTHER; note = 1-deoxy-1-(thymin-1-yl)-alpha-L-threofuranose 2-phosphate
  modified_base 20: mod_base = OTHER; note = 2'-O-methyladenosine-3'-phosphate
  modified_base 21: mod_base = OTHER; note = 2'-deoxy-2'-fluoroadenosine-3'-phosphate conjugated at the 3'-end to an L96 ligand
aacagtgttcttgctctataa

SEQ ID NO: 236 - RNA, 21 nt, synthetic construct
  source 1..21: mol_type = other RNA
  modified_base 1: mod_base = OTHER; note = 2'-deoxy-2'-fluoroadenosine-3'-phosphorothioate
  modified_base 2: mod_base = OTHER; note = 2'-O-methyladenosine-3'-phosphorothioate
  modified_base 3: mod_base = OTHER; note = 2'-deoxy-2'-fluorocytidine-3'-phosphate
  modified_base 4: mod_base = OTHER; note = 2'-O-methyladenosine-3'-phosphate
  modified_base 5: mod_base = OTHER; note = 2'-deoxy-2'-fluoroguanosine-3'-phosphate
  modified_base 6: mod_base = OTHER; note = 2'-O-methyluridine-3'-phosphate
  modified_base 7: mod_base = OTHER; note = 2'-deoxy-2'-fluoroguanosine-3'-phosphate
  modified_base 8: mod_base = OTHER; note = 2'-O-methyluridine-3'-phosphate
  modified_base 9: mod_base = OTHER; note = 2'-deoxy-2'-fluorouridine-3'-phosphate
  modified_base 10: mod_base = OTHER; note = 2'-deoxy-2'-fluorocytidine-3'-phosphate
  modified_base 11: mod_base = OTHER; note = 2'-deoxy-2'-fluorouridine-3'-phosphate
  modified_base 12: mod_base = OTHER; note = 2'-O-methyluridine-3'-phosphate
  modified_base 13: mod_base = OTHER; note = 2'-deoxy-2'-fluoroguanosine-3'-phosphate
  modified_base 14: mod_base = OTHER; note = 2'-O-methylcytidine-3'-phosphate
  modified_base 15: mod_base = OTHER; note = 2'-deoxy-2'-fluorouridine-3'-phosphate
  modified_base 16: mod_base = OTHER; note = 2'-O-methylcytidine-3'-phosphate
  modified_base 17: mod_base = OTHER; note = 2'-deoxy-2'-fluorouridine-3'-phosphate
  modified_base 18: mod_base = OTHER; note = 2'-O-methyladenosine-3'-phosphate
  modified_base 19: mod_base = OTHER; note = 2'-deoxy-2'-fluorouridine-3'-phosphate
  modified_base 20: mod_base = OTHER; note = 1-deoxy-1-(adenin-9-yl)-alpha-L-threofuranose 2-phosphate
  modified_base 21: mod_base = OTHER; note = 2'-deoxy-2'-fluoroadenosine-3'-phosphate conjugated at the 3'-end to an L96 ligand
aacagtgttcttgctctataa

SEQ ID NO: 237 - RNA, 21 nt, synthetic construct
  source 1..21: mol_type = other RNA
  modified_base 1: mod_base = OTHER; note = 2'-deoxy-2'-fluoroadenosine-3'-phosphorothioate
  modified_base 2: mod_base = OTHER; note = 2'-O-methyladenosine-3'-phosphorothioate
  modified_base 3: mod_base = OTHER; note = 2'-deoxy-2'-fluorocytidine-3'-phosphate
  modified_base 4: mod_base = OTHER; note = 2'-O-methyladenosine-3'-phosphate
  modified_base 5: mod_base = OTHER; note = 2'-deoxy-2'-fluoroguanosine-3'-phosphate
  modified_base 6: mod_base = OTHER; note = 2'-O-methyluridine-3'-phosphate
  modified_base 7: mod_base = OTHER; note = 2'-deoxy-2'-fluoroguanosine-3'-phosphate
  modified_base 8: mod_base = OTHER; note = 2'-O-methyluridine-3'-phosphate
  modified_base 9: mod_base = OTHER; note = 2'-deoxy-2'-fluorouridine-3'-phosphate
  modified_base 10: mod_base = OTHER; note = 2'-deoxy-2'-fluorocytidine-3'-phosphate
  modified_base 11: mod_base = OTHER; note = 2'-deoxy-2'-fluorouridine-3'-phosphate
  modified_base 12: mod_base = OTHER; note = 2'-O-methyluridine-3'-phosphate
  modified_base 13: mod_base = OTHER; note = 2'-deoxy-2'-fluoroguanosine-3'-phosphate
  modified_base 14: mod_base = OTHER; note = 2'-O-methylcytidine-3'-phosphate
  modified_base 15: mod_base = OTHER; note = 2'-deoxy-2'-fluorouridine-3'-phosphate
  modified_base 16: mod_base = OTHER; note = 2'-O-methylcytidine-3'-phosphate
  modified_base 17: mod_base = OTHER; note = 2'-deoxy-2'-fluorouridine-3'-phosphate
  modified_base 18: mod_base = OTHER; note = 2'-O-methyladenosine-3'-phosphate
  modified_base 19: mod_base = OTHER; note = 2'-deoxy-2'-fluorouridine-3'-phosphate
  modified_base 20: mod_base = OTHER; note = 2'-O-methyladenosine-3'-phosphate
  modified_base 21: mod_base = OTHER; note = 1-deoxy-1-(adenin-9-yl)-alpha-L-threofuranose 2-phosphate conjugated at the 3'-end to an L96 ligand
aacagtgttcttgctctataa

SEQ ID NO: 238 - RNA, 23 nt, synthetic construct
  source 1..23: mol_type = other RNA
  modified_base 1: mod_base = OTHER; note = 1-deoxy-1-(thymin-1-yl)-alpha-L-threofuranose 2-phosphorothioate
  modified_base 2: mod_base = OTHER; note = 2'-deoxy-2'-fluorouridine-3'-phosphorothioate
  modified_base 3: mod_base = OTHER; note = 2'-O-methyladenosine-3'-phosphate
  modified_base 4: mod_base = OTHER; note = 2'-deoxy-2'-fluorouridine-3'-phosphate
  modified_base 5: mod_base = OTHER; note = 2'-O-methyladenosine-3'-phosphate
  modified_base 6: mod_base = OTHER; note = 2'-deoxy-2'-fluoroguanosine-3'-phosphate
  modified_base 7: mod_base = OTHER; note = 2'-O-methyladenosine-3'-phosphate
  modified_base 8: mod_base = OTHER; note = 2'-deoxy-2'-fluoroguanosine-3'-phosphate
  modified_base 9: mod_base = OTHER; note = 2'-O-methylcytidine-3'-phosphate
  modified_base 10: mod_base = OTHER; note = 2'-deoxy-2'-fluoroadenosine-3'-phosphate
  modified_base 11: mod_base = OTHER; note = 2'-O-methyladenosine-3'-phosphate
  modified_base 12: mod_base = OTHER; note = 2'-O-methylguanosine-3'-phosphate
  modified_base 13: mod_base = OTHER; note = 2'-O-methyladenosine-3'-phosphate
  modified_base 14: mod_base = OTHER; note = 2'-deoxy-2'-fluoroadenosine-3'-phosphate
  modified_base 15: mod_base = OTHER; note = 2'-O-methylcytidine-3'-phosphate
  modified_base 16: mod_base = OTHER; note = 2'-deoxy-2'-fluoroadenosine-3'-phosphate
  modified_base 17: mod_base = OTHER; note = 2'-O-methylcytidine-3'-phosphate
  modified_base 18: mod_base = OTHER; note = 2'-deoxy-2'-fluorouridine-3'-phosphate
  modified_base 19: mod_base = OTHER; note = 2'-O-methylguanosine-3'-phosphate
  modified_base 20: mod_base = OTHER; note = 2'-deoxy-2'-fluorouridine-3'-phosphate
  modified_base 21: mod_base = OTHER; note = 2'-O-methyluridine-3'-phosphorothioate
  modified_base 22: mod_base = OTHER; note = 2'-O-methyluridine-3'-phosphorothioate
  modified_base 23: mod_base = OTHER; note = 2'-O-methyluridine
ttatagagcaagaacactgtttt

SEQ ID NO: 239 - RNA, 23 nt, synthetic construct
  source 1..23: mol_type = other RNA
  modified_base 1: mod_base = OTHER; note = 2'-O-methyluridine-3'-phosphorothioate
  modified_base 2: mod_base = OTHER; note = 1-deoxy-1-(thymin-1-yl)-alpha-L-threofuranose 2-phosphorothioate
  modified_base 3: mod_base = OTHER; note = 2'-O-methyladenosine-3'-phosphate
  modified_base 4: mod_base = OTHER; note = 2'-deoxy-2'-fluorouridine-3'-phosphate
  modified_base 5: mod_base = OTHER; note = 2'-O-methyladenosine-3'-phosphate
  modified_base 6: mod_base = OTHER; note = 2'-deoxy-2'-fluoroguanosine-3'-phosphate
  modified_base 7: mod_base = OTHER; note = 2'-O-methyladenosine-3'-phosphate
  modified_base 8: mod_base = OTHER; note = 2'-deoxy-2'-fluoroguanosine-3'-phosphate
  modified_base 9: mod_base = OTHER; note = 2'-O-methylcytidine-3'-phosphate
  modified_base 10: mod_base = OTHER; note = 2'-deoxy-2'-fluoroadenosine-3'-phosphate
  modified_base 11: mod_base = OTHER; note = 2'-O-methyladenosine-3'-phosphate
  modified_base 12: mod_base = OTHER; note = 2'-O-methylguanosine-3'-phosphate
  modified_base 13: mod_base = OTHER; note = 2'-O-methyladenosine-3'-phosphate
  modified_base 14: mod_base = OTHER; note = 2'-deoxy-2'-fluoroadenosine-3'-phosphate
  modified_base 15: mod_base = OTHER; note = 2'-O-methylcytidine-3'-phosphate
  modified_base 16: mod_base = OTHER; note = 2'-deoxy-2'-fluoroadenosine-3'-phosphate
  modified_base 17: mod_base = OTHER; note = 2'-O-methylcytidine-3'-phosphate
  modified_base 18: mod_base = OTHER; note = 2'-deoxy-2'-fluorouridine-3'-phosphate
  modified_base 19: mod_base = OTHER; note = 2'-O-methylguanosine-3'-phosphate
  modified_base 20: mod_base = OTHER; note = 2'-deoxy-2'-fluorouridine-3'-phosphate
  modified_base 21: mod_base = OTHER; note = 2'-O-methyluridine-3'-phosphorothioate
  modified_base 22: mod_base = OTHER; note = 2'-O-methyluridine-3'-phosphorothioate
  modified_base 23: mod_base = OTHER; note = 2'-O-methyluridine
ttatagagcaagaacactgtttt

SEQ ID NO: 240 - RNA, 23 nt, synthetic construct
  source 1..23: mol_type = other RNA
  modified_base 1: mod_base = OTHER; note = 2'-O-methyluridine-3'-phosphorothioate
  modified_base 2: mod_base = OTHER; note = 2'-deoxy-2'-fluorouridine-3'-phosphorothioate
  modified_base 3: mod_base = OTHER; note = 1-deoxy-1-(adenin-9-yl)-alpha-L-threofuranose 2-phosphate
  modified_base 4: mod_base = OTHER; note = 2'-deoxy-2'-fluorouridine-3'-phosphate
  modified_base 5: mod_base = OTHER; note = 2'-O-methyladenosine-3'-phosphate
  modified_base 6: mod_base = OTHER; note = 2'-deoxy-2'-fluoroguanosine-3'-phosphate
  modified_base 7: mod_base = OTHER; note = 2'-O-methyladenosine-3'-phosphate
  modified_base 8: mod_base = OTHER; note = 2'-deoxy-2'-fluoroguanosine-3'-phosphate
  modified_base 9: mod_base = OTHER; note = 2'-O-methylcytidine-3'-phosphate
  modified_base 10: mod_base = OTHER; note = 2'-deoxy-2'-fluoroadenosine-3'-phosphate
  modified_base 11: mod_base = OTHER; note = 2'-O-methyladenosine-3'-phosphate
  modified_base 12: mod_base = OTHER; note = 2'-O-methylguanosine-3'-phosphate
  modified_base 13: mod_base = OTHER; note = 2'-O-methyladenosine-3'-phosphate
  modified_base 14: mod_base = OTHER; note = 2'-deoxy-2'-fluoroadenosine-3'-phosphate
  modified_base 15: mod_base = OTHER; note = 2'-O-methylcytidine-3'-phosphate
  modified_base 16: mod_base = OTHER; note = 2'-deoxy-2'-fluoroadenosine-3'-phosphate
  modified_base 17: mod_base = OTHER; note = 2'-O-methylcytidine-3'-phosphate
  modified_base 18: mod_base = OTHER; note = 2'-deoxy-2'-fluorouridine-3'-phosphate
  modified_base 19: mod_base = OTHER; note = 2'-O-methylguanosine-3'-phosphate
  modified_base 20: mod_base = OTHER; note = 2'-deoxy-2'-fluorouridine-3'-phosphate
  modified_base 21: mod_base = OTHER; note = 2'-O-methyluridine-3'-phosphorothioate
  modified_base 22: mod_base = OTHER; note = 2'-O-methyluridine-3'-phosphorothioate
  modified_base 23: mod_base = OTHER; note = 2'-O-methyluridine
ttatagagcaagaacactgtttt

SEQ ID NO: 241 - RNA, 23 nt, synthetic construct
  source 1..23: mol_type = other RNA
  modified_base 1: mod_base = OTHER; note = 2'-O-methyluridine-3'-phosphorothioate
  modified_base 2: mod_base = OTHER; note = 2'-deoxy-2'-fluorouridine-3'-phosphorothioate
  modified_base 3: mod_base = OTHER; note = 2'-O-methyladenosine-3'-phosphate
  modified_base 4: mod_base = OTHER; note = 1-deoxy-1-(thymin-1-yl)-alpha-L-threofuranose 2-phosphate
  modified_base 5: mod_base = OTHER; note = 2'-O-methyladenosine-3'-phosphate
  modified_base 6: mod_base = OTHER; note = 2'-deoxy-2'-fluoroguanosine-3'-phosphate
  modified_base 7: mod_base = OTHER; note = 2'-O-methyladenosine-3'-phosphate
  modified_base 8: mod_base = OTHER; note = 2'-deoxy-2'-fluoroguanosine-3'-phosphate
  modified_base 9: mod_base = OTHER; note = 2'-O-methylcytidine-3'-phosphate
  modified_base 10: mod_base = OTHER; note = 2'-deoxy-2'-fluoroadenosine-3'-phosphate
  modified_base 11: mod_base = OTHER; note = 2'-O-methyladenosine-3'-phosphate
  modified_base 12: mod_base = OTHER; note = 2'-O-methylguanosine-3'-phosphate
  modified_base 13: mod_base = OTHER; note = 2'-O-methyladenosine-3'-phosphate
  modified_base 14: mod_base = OTHER; note = 2'-deoxy-2'-fluoroadenosine-3'-phosphate
  modified_base 15: mod_base = OTHER; note = 2'-O-methylcytidine-3'-phosphate
  modified_base 16: mod_base = OTHER; note = 2'-deoxy-2'-fluoroadenosine-3'-phosphate
  modified_base 17: mod_base = OTHER; note = 2'-O-methylcytidine-3'-phosphate
  modified_base 18: mod_base = OTHER; note = 2'-deoxy-2'-fluorouridine-3'-phosphate
  modified_base 19: mod_base = OTHER; note = 2'-O-methylguanosine-3'-phosphate
  modified_base 20: mod_base = OTHER; note = 2'-deoxy-2'-fluorouridine-3'-phosphate
  modified_base 21: mod_base = OTHER; note = 2'-O-methyluridine-3'-phosphorothioate
  modified_base 22: mod_base = OTHER; note = 2'-O-methyluridine-3'-phosphorothioate
  modified_base 23: mod_base = OTHER; note = 2'-O-methyluridine
ttatagagcaagaacactgtttt

SEQ ID NO: 242 - RNA, 23 nt, synthetic construct
  source 1..23: mol_type = other RNA
  modified_base 1: mod_base = OTHER; note = 2'-O-methyluridine-3'-phosphorothioate
  modified_base 2: mod_base = OTHER; note = 2'-deoxy-2'-fluorouridine-3'-phosphorothioate
  modified_base 3: mod_base = OTHER; note = 2'-O-methyladenosine-3'-phosphate
  modified_base 4: mod_base = OTHER; note = 2'-deoxy-2'-fluorouridine-3'-phosphate
  modified_base 5: mod_base = OTHER; note = 1-deoxy-1-(adenin-9-yl)-alpha-L-threofuranose 2-phosphate
  modified_base 6: mod_base = OTHER; note = 2'-deoxy-2'-fluoroguanosine-3'-phosphate
  modified_base 7: mod_base = OTHER; note = 2'-O-methyladenosine-3'-phosphate
  modified_base 8: mod_base = OTHER; note = 2'-deoxy-2'-fluoroguanosine-3'-phosphate
  modified_base 9: mod_base = OTHER; note = 2'-O-methylcytidine-3'-phosphate
  modified_base 10: mod_base = OTHER; note = 2'-deoxy-2'-fluoroadenosine-3'-phosphate
  modified_base 11: mod_base = OTHER; note = 2'-O-methyladenosine-3'-phosphate
  modified_base 12: mod_base = OTHER; note = 2'-O-methylguanosine-3'-phosphate
  modified_base 13: mod_base = OTHER; note = 2'-O-methyladenosine-3'-phosphate
  modified_base 14: mod_base = OTHER; note = 2'-deoxy-2'-fluoroadenosine-3'-phosphate
  modified_base 15: mod_base = OTHER; note = 2'-O-methylcytidine-3'-phosphate
  modified_base 16: mod_base = OTHER; note = 2'-deoxy-2'-fluoroadenosine-3'-phosphate
  modified_base 17: mod_base = OTHER; note = 2'-O-methylcytidine-3'-phosphate
  modified_base 18: mod_base = OTHER; note = 2'-deoxy-2'-fluorouridine-3'-phosphate
  modified_base 19: mod_base = OTHER; note = 2'-O-methylguanosine-3'-phosphate
  modified_base 20: mod_base = OTHER; note = 2'-deoxy-2'-fluorouridine-3'-phosphate
  modified_base 21: mod_base = OTHER; note = 2'-O-methyluridine-3'-phosphorothioate
  modified_base 22: mod_base = OTHER; note = 2'-O-methyluridine-3'-phosphorothioate
  modified_base 23: mod_base = OTHER; note = 2'-O-methyluridine
ttatagagcaagaacactgtttt

SEQ ID NO: 243 - RNA, 23 nt, synthetic construct
  source 1..23: mol_type = other RNA
  modified_base 1: mod_base = OTHER; note = 2'-O-methyluridine-3'-phosphorothioate
  modified_base 2: mod_base = OTHER; note = 2'-deoxy-2'-fluorouridine-3'-phosphorothioate
  modified_base 3: mod_base = OTHER; note = 2'-O-methyladenosine-3'-phosphate
  modified_base 4: mod_base = OTHER; note = 2'-deoxy-2'-fluorouridine-3'-phosphate
  modified_base 5: mod_base = OTHER; note = 2'-O-methyladenosine-3'-phosphate
  modified_base 6: mod_base = OTHER; note = 1-deoxy-1-(guanin-9-yl)-alpha-L-threofuranose 2-phosphate
  modified_base 7: mod_base = OTHER; note = 2'-O-methyladenosine-3'-phosphate
  modified_base 8: mod_base = OTHER; note = 2'-deoxy-2'-fluoroguanosine-3'-phosphate
  modified_base 9: mod_base = OTHER; note = 2'-O-methylcytidine-3'-phosphate
  modified_base 10: mod_base = OTHER; note = 2'-deoxy-2'-fluoroadenosine-3'-phosphate
  modified_base 11: mod_base = OTHER; note = 2'-O-methyladenosine-3'-phosphate
  modified_base 12: mod_base = OTHER; note = 2'-O-methylguanosine-3'-phosphate
  modified_base 13: mod_base = OTHER; note = 2'-O-methyladenosine-3'-phosphate
  modified_base 14: mod_base = OTHER; note = 2'-deoxy-2'-fluoroadenosine-3'-phosphate
  modified_base 15: mod_base = OTHER; note = 2'-O-methylcytidine-3'-phosphate
  modified_base 16: mod_base = OTHER; note = 2'-deoxy-2'-fluoroadenosine-3'-phosphate
  modified_base 17: mod_base = OTHER; note = 2'-O-methylcytidine-3'-phosphate
  modified_base 18: mod_base = OTHER; note = 2'-deoxy-2'-fluorouridine-3'-phosphate
  modified_base 19: mod_base = OTHER; note = 2'-O-methylguanosine-3'-phosphate
  modified_base 20: mod_base = OTHER; note = 2'-deoxy-2'-fluorouridine-3'-phosphate
  modified_base 21: mod_base = OTHER; note = 2'-O-methyluridine-3'-phosphorothioate
  modified_base 22: mod_base = OTHER; note = 2'-O-methyluridine-3'-phosphorothioate
  modified_base 23: mod_base = OTHER; note = 2'-O-methyluridine
ttatagagcaagaacactgtttt

SEQ ID NO: 244 - RNA, 23 nt, synthetic construct
  source 1..23: mol_type = other RNA
  modified_base 1: mod_base = OTHER; note = 2'-O-methyluridine-3'-phosphorothioate
  modified_base 2: mod_base = OTHER; note = 2'-deoxy-2'-fluorouridine-3'-phosphorothioate
  modified_base 3: mod_base = OTHER; note = 2'-O-methyladenosine-3'-phosphate
  modified_base 4: mod_base = OTHER; note = 2'-deoxy-2'-fluorouridine-3'-phosphate
  modified_base 5: mod_base = OTHER; note = 2'-O-methyladenosine-3'-phosphate
  modified_base 6: mod_base = OTHER; note = 2'-deoxy-2'-fluoroguanosine-3'-phosphate
  modified_base 7: mod_base = OTHER; note = 1-deoxy-1-(adenin-9-yl)-alpha-L-threofuranose 2-phosphate
  modified_base 8: mod_base = OTHER; note = 2'-deoxy-2'-fluoroguanosine-3'-phosphate
  modified_base 9: mod_base = OTHER; note = 2'-O-methylcytidine-3'-phosphate
  modified_base 10: mod_base = OTHER; note = 2'-deoxy-2'-fluoroadenosine-3'-phosphate
  modified_base 11: mod_base = OTHER; note = 2'-O-methyladenosine-3'-phosphate
  modified_base 12: mod_base = OTHER; note = 2'-O-methylguanosine-3'-phosphate
  modified_base 13: mod_base = OTHER; note = 2'-O-methyladenosine-3'-phosphate
  modified_base 14: mod_base = OTHER; note = 2'-deoxy-2'-fluoroadenosine-3'-phosphate
  modified_base 15: mod_base = OTHER; note = 2'-O-methylcytidine-3'-phosphate
  modified_base 16: mod_base = OTHER; note = 2'-deoxy-2'-fluoroadenosine-3'-phosphate
  modified_base 17: mod_base = OTHER; note = 2'-O-methylcytidine-3'-phosphate
  modified_base 18: mod_base = OTHER; note = 2'-deoxy-2'-fluorouridine-3'-phosphate
  modified_base 19: mod_base = OTHER; note = 2'-O-methylguanosine-3'-phosphate
  modified_base 20: mod_base = OTHER; note = 2'-deoxy-2'-fluorouridine-3'-phosphate
  modified_base 21: mod_base = OTHER; note = 2'-O-methyluridine-3'-phosphorothioate
  modified_base 22: mod_base = OTHER; note = 2'-O-methyluridine-3'-phosphorothioate
  modified_base 23: mod_base = OTHER; note = 2'-O-methyluridine
ttatagagcaagaacactgtttt

SEQ ID NO: 245 - RNA, 23 nt, synthetic construct
  source 1..23: mol_type = other RNA
  modified_base 1: mod_base = OTHER; note = 2'-O-methyluridine-3'-phosphorothioate
  modified_base 2: mod_base = OTHER; note = 2'-deoxy-2'-fluorouridine-3'-phosphorothioate
  modified_base 3: mod_base = OTHER; note = 2'-O-methyladenosine-3'-phosphate
  modified_base 4: mod_base = OTHER; note = 2'-deoxy-2'-fluorouridine-3'-phosphate
  modified_base 5: mod_base = OTHER; note = 2'-O-methyladenosine-3'-phosphate
  modified_base 6: mod_base = OTHER; note = 2'-deoxy-2'-fluoroguanosine-3'-phosphate
  modified_base 7: mod_base = OTHER; note = 2'-O-methyladenosine-3'-phosphate
  modified_base 8: mod_base = OTHER; note = 1-deoxy-1-(guanin-9-yl)-alpha-L-threofuranose 2-phosphate
  modified_base 9: mod_base = OTHER; note = 2'-O-methylcytidine-3'-phosphate
  modified_base 10: mod_base = OTHER; note = 2'-deoxy-2'-fluoroadenosine-3'-phosphate
  modified_base 11: mod_base = OTHER; note = 2'-O-methyladenosine-3'-phosphate
  modified_base 12: mod_base = OTHER; note = 2'-O-methylguanosine-3'-phosphate
  modified_base 13: mod_base = OTHER; note = 2'-O-methyladenosine-3'-phosphate
  modified_base 14: mod_base = OTHER; note = 2'-deoxy-2'-fluoroadenosine-3'-phosphate
  modified_base 15: mod_base = OTHER; note = 2'-O-methylcytidine-3'-phosphate
  modified_base 16: mod_base = OTHER; note = 2'-deoxy-2'-fluoroadenosine-3'-phosphate
  modified_base 17: mod_base = OTHER; note = 2'-O-methylcytidine-3'-phosphate
  modified_base 18: mod_base = OTHER; note = 2'-deoxy-2'-fluorouridine-3'-phosphate
  modified_base 19: mod_base = OTHER; note = 2'-O-methylguanosine-3'-phosphate
  modified_base 20: mod_base = OTHER; note = 2'-deoxy-2'-fluorouridine-3'-phosphate
  modified_base 21: mod_base = OTHER; note = 2'-O-methyluridine-3'-phosphorothioate
  modified_base 22: mod_base = OTHER; note = 2'-O-methyluridine-3'-phosphorothioate
  modified_base 23: mod_base = OTHER; note = 2'-O-methyluridine
ttatagagcaagaacactgtttt

SEQ ID NO: 246 - RNA, 23 nt, synthetic construct
  source 1..23: mol_type = other RNA
  modified_base 1: mod_base = OTHER; note = 2'-O-methyluridine-3'-phosphorothioate
  modified_base 2: mod_base = OTHER; note = 2'-deoxy-2'-fluorouridine-3'-phosphorothioate
  modified_base 3: mod_base = OTHER; note = 2'-O-methyladenosine-3'-phosphate
  modified_base 4: mod_base = OTHER; note = 2'-deoxy-2'-fluorouridine-3'-phosphate
  modified_base 5: mod_base = OTHER; note = 2'-O-methyladenosine-3'-phosphate
  modified_base 6: mod_base = OTHER; note = 2'-deoxy-2'-fluoroguanosine-3'-phosphate
  modified_base 7: mod_base = OTHER; note = 2'-O-methyladenosine-3'-phosphate
  modified_base 8: mod_base = OTHER; note = 2'-deoxy-2'-fluoroguanosine-3'-phosphate
  modified_base 9: mod_base = OTHER; note 1-deoxy-1-(5-methylcytosin-1-yl)-alpha-L-threofuranose 2-phosphate
  modified_base 10: mod_base = OTHER; note = 2'-deoxy-2'-fluoroadenosine-3'-phosphate
  modified_base 11: mod_base = OTHER; note = 2'-O-methyladenosine-3'-phosphate
  modified_base 12: mod_base = OTHER; note = 2'-O-methylguanosine-3'-phosphate
  modified_base 13: mod_base = OTHER; note = 2'-O-methyladenosine-3'-phosphate
  modified_base 14: mod_base = OTHER; note = 2'-deoxy-2'-fluoroadenosine-3'-phosphate
  modified_base 15: mod_base = OTHER; note = 2'-O-methylcytidine-3'-phosphate
  modified_base 16: mod_base = OTHER; note = 2'-deoxy-2'-fluoroadenosine-3'-phosphate
  modified_base 17: mod_base = OTHER; note = 2'-O-methylcytidine-3'-phosphate
  modified_base 18: mod_base = OTHER; note = 2'-deoxy-2'-fluorouridine-3'-phosphate
  modified_base 19: mod_base = OTHER; note = 2'-O-methylguanosine-3'-phosphate
  modified_base 20: mod_base = OTHER; note = 2'-deoxy-2'-fluorouridine-3'-phosphate
  modified_base 21: mod_base = OTHER; note = 2'-O-methyluridine-3'-phosphorothioate
  modified_base 22: mod_base = OTHER; note = 2'-O-methyluridine-3'-phosphorothioate
  modified_base 23: mod_base = OTHER; note = 2'-O-methyluridine
ttatagagcaagaacactgtttt

SEQ ID NO: 247 - RNA, 23 nt, synthetic construct
  source 1..23: mol_type = other RNA
  modified_base 1: mod_base = OTHER; note = 2'-O-methyluridine-3'-phosphorothioate
  modified_base 2: mod_base = OTHER; note = 2'-deoxy-2'-fluorouridine-3'-phosphorothioate
  modified_base 3: mod_base = OTHER; note = 2'-O-methyladenosine-3'-phosphate
  modified_base 4: mod_base = OTHER; note = 2'-deoxy-2'-fluorouridine-3'-phosphate
  modified_base 5: mod_base = OTHER; note = 2'-O-methyladenosine-3'-phosphate
  modified_base 6: mod_base = OTHER; note = 2'-deoxy-2'-fluoroguanosine-3'-phosphate
  modified_base 7: mod_base = OTHER; note = 2'-O-methyladenosine-3'-phosphate
  modified_base 8: mod_base = OTHER; note = 2'-deoxy-2'-fluoroguanosine-3'-phosphate
  modified_base 9: mod_base = OTHER; note = 2'-O-methylcytidine-3'-phosphate
  modified_base 10: mod_base = OTHER; note = 1-deoxy-1-(adenin-9-yl)-alpha-L-threofuranose 2-phosphate
  modified_base 11: mod_base = OTHER; note = 2'-O-methyladenosine-3'-phosphate
  modified_base 12: mod_base = OTHER; note = 2'-O-methylguanosine-3'-phosphate
  modified_base 13: mod_base = OTHER; note = 2'-O-methyladenosine-3'-phosphate
  modified_base 14: mod_base = OTHER; note = 2'-deoxy-2'-fluoroadenosine-3'-phosphate
  modified_base 15: mod_base = OTHER; note = 2'-O-methylcytidine-3'-phosphate
  modified_base 16: mod_base = OTHER; note = 2'-deoxy-2'-fluoroadenosine-3'-phosphate
  modified_base 17: mod_base = OTHER; note = 2'-O-methylcytidine-3'-phosphate
  modified_base 18: mod_base = OTHER; note = 2'-deoxy-2'-fluorouridine-3'-phosphate
  modified_base 19: mod_base = OTHER; note = 2'-O-methylguanosine-3'-phosphate
  modified_base 20: mod_base = OTHER; note = 2'-deoxy-2'-fluorouridine-3'-phosphate
  modified_base 21: mod_base = OTHER; note = 2'-O-methyluridine-3'-phosphorothioate
  modified_base 22: mod_base = OTHER; note = 2'-O-methyluridine-3'-phosphorothioate
  modified_base 23: mod_base = OTHER; note = 2'-O-methyluridine
ttatagagcaagaacactgtttt

SEQ ID NO: 248 - RNA, 23 nt, synthetic construct
  source 1..23: mol_type = other RNA
  modified_base 1: mod_base = OTHER; note = 2'-O-methyluridine-3'-phosphorothioate
  modified_base 2: mod_base = OTHER; note = 2'-deoxy-2'-fluorouridine-3'-phosphorothioate
  modified_base 3: mod_base = OTHER; note = 2'-O-methyladenosine-3'-phosphate
  modified_base 4: mod_base = OTHER; note = 2'-deoxy-2'-fluorouridine-3'-phosphate
  modified_base 5: mod_base = OTHER; note = 2'-O-methyladenosine-3'-phosphate
  modified_base 6: mod_base = OTHER; note = 2'-deoxy-2'-fluoroguanosine-3'-phosphate
  modified_base 7: mod_base = OTHER; note = 2'-O-methyladenosine-3'-phosphate
  modified_base 8: mod_base = OTHER; note = 2'-deoxy-2'-fluoroguanosine-3'-phosphate
  modified_base 9: mod_base = OTHER; note = 2'-O-methylcytidine-3'-phosphate
  modified_base 10: mod_base = OTHER; note = 2'-deoxy-2'-fluoroadenosine-3'-phosphate
  modified_base 11: mod_base = OTHER; note = 1-deoxy-1-(adenin-9-yl)-alpha-L-threofuranose 2-phosphate
  modified_base 12: mod_base = OTHER; note = 2'-O-methylguanosine-3'-phosphate
  modified_base 13: mod_base = OTHER; note = 2'-O-methyladenosine-3'-phosphate
  modified_base 14: mod_base = OTHER; note = 2'-deoxy-2'-fluoroadenosine-3'-phosphate
  modified_base 15: mod_base = OTHER; note = 2'-O-methylcytidine-3'-phosphate
  modified_base 16: mod_base = OTHER; note = 2'-deoxy-2'-fluoroadenosine-3'-phosphate
  modified_base 17: mod_base = OTHER; note = 2'-O-methylcytidine-3'-phosphate
  modified_base 18: mod_base = OTHER; note = 2'-deoxy-2'-fluorouridine-3'-phosphate
  modified_base 19: mod_base = OTHER; note = 2'-O-methylguanosine-3'-phosphate
  modified_base 20: mod_base = OTHER; note = 2'-deoxy-2'-fluorouridine-3'-phosphate
  modified_base 21: mod_base = OTHER; note = 2'-O-methyluridine-3'-phosphorothioate
  modified_base 22: mod_base = OTHER; note = 2'-O-methyluridine-3'-phosphorothioate
  modified_base 23: mod_base = OTHER; note = 2'-O-methyluridine
ttatagagcaagaacactgtttt

SEQ ID NO: 249 - RNA, 23 nt, synthetic construct
  source 1..23: mol_type = other RNA
  modified_base 1: mod_base = OTHER; note = 2'-O-methyluridine-3'-phosphorothioate
  modified_base 2: mod_base = OTHER; note = 2'-deoxy-2'-fluorouridine-3'-phosphorothioate
  modified_base 3: mod_base = OTHER; note = 2'-O-methyladenosine-3'-phosphate
  modified_base 4: mod_base = OTHER; note = 2'-deoxy-2'-fluorouridine-3'-phosphate
  modified_base 5: mod_base = OTHER; note = 2'-O-methyladenosine-3'-phosphate
  modified_base 6: mod_base = OTHER; note = 2'-deoxy-2'-fluoroguanosine-3'-phosphate
  modified_base 7: mod_base = OTHER; note = 2'-O-methyladenosine-3'-phosphate
  modified_base 8: mod_base = OTHER; note = 2'-deoxy-2'-fluoroguanosine-3'-phosphate
  modified_base 9: mod_base = OTHER; note = 2'-O-methylcytidine-3'-phosphate
  modified_base 10: mod_base = OTHER; note = 2'-deoxy-2'-fluoroadenosine-3'-phosphate
  modified_base 11: mod_base = OTHER; note = 2'-O-methyladenosine-3'-phosphate
  modified_base 12: mod_base = OTHER; note = 1-deoxy-1-(guanin-9-yl)-alpha-L-threofuranose 2-phosphate
  modified_base 13: mod_base = OTHER; note = 2'-O-methyladenosine-3'-phosphate
  modified_base 14: mod_base = OTHER; note = 2'-deoxy-2'-fluoroadenosine-3'-phosphate
  modified_base 15: mod_base = OTHER; note = 2'-O-methylcytidine-3'-phosphate
  modified_base 16: mod_base = OTHER; note = 2'-deoxy-2'-fluoroadenosine-3'-phosphate
  modified_base 17: mod_base = OTHER; note = 2'-O-methylcytidine-3'-phosphate
  modified_base 18: mod_base = OTHER; note = 2'-deoxy-2'-fluorouridine-3'-phosphate
  modified_base 19: mod_base = OTHER; note = 2'-O-methylguanosine-3'-phosphate
  modified_base 20: mod_base = OTHER; note = 2'-deoxy-2'-fluorouridine-3'-phosphate
  modified_base 21: mod_base = OTHER; note = 2'-O-methyluridine-3'-phosphorothioate
  modified_base 22: mod_base = OTHER; note = 2'-O-methyluridine-3'-phosphorothioate
  modified_base 23: mod_base = OTHER; note = 2'-O-methyluridine
ttatagagcaagaacactgtttt

SEQ ID NO: 250 - RNA, 23 nt, synthetic construct
  source 1..23: mol_type = other RNA
  modified_base 1: mod_base = OTHER; note = 2'-O-methyluridine-3'-phosphorothioate
  modified_base 2: mod_base = OTHER; note = 2'-deoxy-2'-fluorouridine-3'-phosphorothioate
  modified_base 3: mod_base = OTHER; note = 2'-O-methyladenosine-3'-phosphate
  modified_base 4: mod_base = OTHER; note = 2'-deoxy-2'-fluorouridine-3'-phosphate
  modified_base 5: mod_base = OTHER; note = 2'-O-methyladenosine-3'-phosphate
  modified_base 6: mod_base = OTHER; note = 2'-deoxy-2'-fluoroguanosine-3'-phosphate
  modified_base 7: mod_base = OTHER; note = 2'-O-methyladenosine-3'-phosphate
  modified_base 8: mod_base = OTHER; note = 2'-deoxy-2'-fluoroguanosine-3'-phosphate
  modified_base 9: mod_base = OTHER; note = 2'-O-methylcytidine-3'-phosphate
  modified_base 10: mod_base = OTHER; note = 2'-deoxy-2'-fluoroadenosine-3'-phosphate
  modified_base 11: mod_base = OTHER; note = 2'-O-methyladenosine-3'-phosphate
  modified_base 12: mod_base = OTHER; note = 2'-O-methylguanosine-3'-phosphate
  modified_base 13: mod_base = OTHER; note = 1-deoxy-1-(adenin-9-yl)-alpha-L-threofuranose 2-phosphate
  modified_base 14: mod_base = OTHER; note = 2'-deoxy-2'-fluoroadenosine-3'-phosphate
  modified_base 15: mod_base = OTHER; note = 2'-O-methylcytidine-3'-phosphate
  modified_base 16: mod_base = OTHER; note = 2'-deoxy-2'-fluoroadenosine-3'-phosphate
  modified_base 17: mod_base = OTHER; note = 2'-O-methylcytidine-3'-phosphate
  modified_base 18: mod_base = OTHER; note = 2'-deoxy-2'-fluorouridine-3'-phosphate
  modified_base 19: mod_base = OTHER; note = 2'-O-methylguanosine-3'-phosphate
  modified_base 20: mod_base = OTHER; note = 2'-deoxy-2'-fluorouridine-3'-phosphate
  modified_base 21: mod_base = OTHER; note = 2'-O-methyluridine-3'-phosphorothioate
  modified_base 22: mod_base = OTHER; note = 2'-O-methyluridine-3'-phosphorothioate
  modified_base 23: mod_base = OTHER; note = 2'-O-methyluridine
ttatagagcaagaacactgtttt

SEQ ID NO: 251 - RNA, 23 nt, synthetic construct
  source 1..23: mol_type = other RNA
  modified_base 1: mod_base = OTHER; note = 2'-O-methyluridine-3'-phosphorothioate
  modified_base 2: mod_base = OTHER; note = 2'-deoxy-2'-fluorouridine-3'-phosphorothioate
  modified_base 3: mod_base = OTHER; note = 2'-O-methyladenosine-3'-phosphate
  modified_base 4: mod_base = OTHER; note = 2'-deoxy-2'-fluorouridine-3'-phosphate
  modified_base 5: mod_base = OTHER; note = 2'-O-methyladenosine-3'-phosphate
  modified_base 6: mod_base = OTHER; note = 2'-deoxy-2'-fluoroguanosine-3'-phosphate
  modified_base 7: mod_base = OTHER; note = 2'-O-methyladenosine-3'-phosphate
  modified_base 8: mod_base = OTHER; note = 2'-deoxy-2'-fluoroguanosine-3'-phosphate
  modified_base 9: mod_base = OTHER; note = 2'-O-methylcytidine-3'-phosphate
  modified_base 10: mod_base = OTHER; note = 2'-deoxy-2'-fluoroadenosine-3'-phosphate
  modified_base 11: mod_base = OTHER; note = 2'-O-methyladenosine-3'-phosphate
  modified_base 12: mod_base = OTHER; note = 2'-O-methylguanosine-3'-phosphate
  modified_base 13: mod_base = OTHER; note = 2'-O-methyladenosine-3'-phosphate
  modified_base 14: mod_base = OTHER; note = 1-deoxy-1-(adenin-9-yl)-alpha-L-threofuranose 2-phosphate
  modified_base 15: mod_base = OTHER; note = 2'-O-methylcytidine-3'-phosphate
  modified_base 16: mod_base = OTHER; note = 2'-deoxy-2'-fluoroadenosine-3'-phosphate
  modified_base 17: mod_base = OTHER; note = 2'-O-methylcytidine-3'-phosphate
  modified_base 18: mod_base = OTHER; note = 2'-deoxy-2'-fluorouridine-3'-phosphate
  modified_base 19: mod_base = OTHER; note = 2'-O-methylguanosine-3'-phosphate
  modified_base 20: mod_base = OTHER; note = 2'-deoxy-2'-fluorouridine-3'-phosphate
  modified_base 21: mod_base = OTHER; note = 2'-O-methyluridine-3'-phosphorothioate
  modified_base 22: mod_base = OTHER; note = 2'-O-methyluridine-3'-phosphorothioate
  modified_base 23: mod_base = OTHER; note = 2'-O-methyluridine
ttatagagcaagaacactgtttt

SEQ ID NO: 252 - RNA, 23 nt, synthetic construct
  source 1..23: mol_type = other RNA
  modified_base 1: mod_base = OTHER; note = 2'-O-methyluridine-3'-phosphorothioate
  modified_base 2: mod_base = OTHER; note = 2'-deoxy-2'-fluorouridine-3'-phosphorothioate
  modified_base 3: mod_base = OTHER; note = 2'-O-methyladenosine-3'-phosphate
  modified_base 4: mod_base = OTHER; note = 2'-deoxy-2'-fluorouridine-3'-phosphate
  modified_base 5: mod_base = OTHER; note = 2'-O-methyladenosine-3'-phosphate
  modified_base 6: mod_base = OTHER; note = 2'-deoxy-2'-fluoroguanosine-3'-phosphate
  modified_base 7: mod_base = OTHER; note = 2'-O-methyladenosine-3'-phosphate
  modified_base 8: mod_base = OTHER; note = 2'-deoxy-2'-fluoroguanosine-3'-phosphate
  modified_base 9: mod_base = OTHER; note = 2'-O-methylcytidine-3'-phosphate
  modified_base 10: mod_base = OTHER; note = 2'-deoxy-2'-fluoroadenosine-3'-phosphate
  modified_base 11: mod_base = OTHER; note = 2'-O-methyladenosine-3'-phosphate
  modified_base 12: mod_base = OTHER; note = 2'-O-methylguanosine-3'-phosphate
  modified_base 13: mod_base = OTHER; note = 2'-O-methyladenosine-3'-phosphate
  modified_base 14: mod_base = OTHER; note = 2'-deoxy-2'-fluoroadenosine-3'-phosphate
  modified_base 15: mod_base = OTHER; note 1-deoxy-1-(5-methylcytosin-1-yl)-alpha-L-threofuranose 2-phosphate
  modified_base 16: mod_base = OTHER; note = 2'-deoxy-2'-fluoroadenosine-3'-phosphate
  modified_base 17: mod_base = OTHER; note = 2'-O-methylcytidine-3'-phosphate
  modified_base 18: mod_base = OTHER; note = 2'-deoxy-2'-fluorouridine-3'-phosphate
  modified_base 19: mod_base = OTHER; note = 2'-O-methylguanosine-3'-phosphate
  modified_base 20: mod_base = OTHER; note = 2'-deoxy-2'-fluorouridine-3'-phosphate
  modified_base 21: mod_base = OTHER; note = 2'-O-methyluridine-3'-phosphorothioate
  modified_base 22: mod_base = OTHER; note = 2'-O-methyluridine-3'-phosphorothioate
  modified_base 23: mod_base = OTHER; note = 2'-O-methyluridine
ttatagagcaagaacactgtttt

SEQ ID NO: 253 - RNA, 23 nt, synthetic construct
  source 1..23: mol_type = other RNA
  modified_base 1: mod_base = OTHER; note = 2'-O-methyluridine-3'-phosphorothioate
  modified_base 2: mod_base = OTHER; note = 2'-deoxy-2'-fluorouridine-3'-phosphorothioate
  modified_base 3: mod_base = OTHER; note = 2'-O-methyladenosine-3'-phosphate
  modified_base 4: mod_base = OTHER; note = 2'-deoxy-2'-fluorouridine-3'-phosphate
  modified_base 5: mod_base = OTHER; note = 2'-O-methyladenosine-3'-phosphate
  modified_base 6: mod_base = OTHER; note = 2'-deoxy-2'-fluoroguanosine-3'-phosphate
  modified_base 7: mod_base = OTHER; note = 2'-O-methyladenosine-3'-phosphate
  modified_base 8: mod_base = OTHER; note = 2'-deoxy-2'-fluoroguanosine-3'-phosphate
  modified_base 9: mod_base = OTHER; note = 2'-O-methylcytidine-3'-phosphate
  modified_base 10: mod_base = OTHER; note = 2'-deoxy-2'-fluoroadenosine-3'-phosphate
  modified_base 11: mod_base = OTHER; note = 2'-O-methyladenosine-3'-phosphate
  modified_base 12: mod_base = OTHER; note = 2'-O-methylguanosine-3'-phosphate
  modified_base 13: mod_base = OTHER; note = 2'-O-methyladenosine-3'-phosphate
  modified_base 14: mod_base = OTHER; note = 2'-deoxy-2'-fluoroadenosine-3'-phosphate
  modified_base 15: mod_base = OTHER; note = 2'-O-methylcytidine-3'-phosphate
  modified_base 16: mod_base = OTHER; note = 1-deoxy-1-(adenin-9-yl)-alpha-L-threofuranose 2-phosphate
  modified_base 17: mod_base = OTHER; note = 2'-O-methylcytidine-3'-phosphate
  modified_base 18: mod_base = OTHER; note = 2'-deoxy-2'-fluorouridine-3'-phosphate
  modified_base 19: mod_base = OTHER; note = 2'-O-methylguanosine-3'-phosphate
  modified_base 20: mod_base = OTHER; note = 2'-deoxy-2'-fluorouridine-3'-phosphate
  modified_base 21: mod_base = OTHER; note = 2'-O-methyluridine-3'-phosphorothioate
  modified_base 22: mod_base = OTHER; note = 2'-O-methyluridine-3'-phosphorothioate
  modified_base 23: mod_base = OTHER; note = 2'-O-methyluridine
ttatagagcaagaacactgtttt

SEQ ID NO: 254 - RNA, 23 nt, synthetic construct
  source 1..23: mol_type = other RNA
  modified_base 1: mod_base = OTHER; note = 2'-O-methyluridine-3'-phosphorothioate
  modified_base 2: mod_base = OTHER; note = 2'-deoxy-2'-fluorouridine-3'-phosphorothioate
  modified_base 3: mod_base = OTHER; note = 2'-O-methyladenosine-3'-phosphate
  modified_base 4: mod_base = OTHER; note = 2'-deoxy-2'-fluorouridine-3'-phosphate
  modified_base 5: mod_base = OTHER; note = 2'-O-methyladenosine-3'-phosphate
  modified_base 6: mod_base = OTHER; note = 2'-deoxy-2'-fluoroguanosine-3'-phosphate
  modified_base 7: mod_base = OTHER; note = 2'-O-methyladenosine-3'-phosphate
  modified_base 8: mod_base = OTHER; note = 2'-deoxy-2'-fluoroguanosine-3'-phosphate
  modified_base 9: mod_base = OTHER; note = 2'-O-methylcytidine-3'-phosphate
  modified_base 10: mod_base = OTHER; note = 2'-deoxy-2'-fluoroadenosine-3'-phosphate
  modified_base 11: mod_base = OTHER; note = 2'-O-methyladenosine-3'-phosphate
  modified_base 12: mod_base = OTHER; note = 2'-O-methylguanosine-3'-phosphate
  modified_base 13: mod_base = OTHER; note = 2'-O-methyladenosine-3'-phosphate
  modified_base 14: mod_base = OTHER; note = 2'-deoxy-2'-fluoroadenosine-3'-phosphate
  modified_base 15: mod_base = OTHER; note = 2'-O-methylcytidine-3'-phosphate
  modified_base 16: mod_base = OTHER; note = 2'-deoxy-2'-fluoroadenosine-3'-phosphate
  modified_base 17: mod_base = OTHER; note 1-deoxy-1-(5-methylcytosin-1-yl)-alpha-L-threofuranose 2-phosphate
  modified_base 18: mod_base = OTHER; note = 2'-deoxy-2'-fluorouridine-3'-phosphate
  modified_base 19: mod_base = OTHER; note = 2'-O-methylguanosine-3'-phosphate
  modified_base 20: mod_base = OTHER; note = 2'-deoxy-2'-fluorouridine-3'-phosphate
  modified_base 21: mod_base = OTHER; note = 2'-O-methyluridine-3'-phosphorothioate
  modified_base 22: mod_base = OTHER; note = 2'-O-methyluridine-3'-phosphorothioate
  modified_base 23: mod_base = OTHER; note = 2'-O-methyluridine
ttatagagcaagaacactgtttt

SEQ ID NO: 255 - RNA, 23 nt, synthetic construct
  source 1..23: mol_type = other RNA
  modified_base 1: mod_base = OTHER; note = 2'-O-methyluridine-3'-phosphorothioate
  modified_base 2: mod_base = OTHER; note = 2'-deoxy-2'-fluorouridine-3'-phosphorothioate
  modified_base 3: mod_base = OTHER; note = 2'-O-methyladenosine-3'-phosphate
  modified_base 4: mod_base = OTHER; note = 2'-deoxy-2'-fluorouridine-3'-phosphate
  modified_base 5: mod_base = OTHER; note = 2'-O-methyladenosine-3'-phosphate
  modified_base 6: mod_base = OTHER; note = 2'-deoxy-2'-fluoroguanosine-3'-phosphate
  modified_base 7: mod_base = OTHER; note = 2'-O-methyladenosine-3'-phosphate
  modified_base 8: mod_base = OTHER; note = 2'-deoxy-2'-fluoroguanosine-3'-phosphate
  modified_base 9: mod_base = OTHER; note = 2'-O-methylcytidine-3'-phosphate
  modified_base 10: mod_base = OTHER; note = 2'-deoxy-2'-fluoroadenosine-3'-phosphate
  modified_base 11: mod_base = OTHER; note = 2'-O-methyladenosine-3'-phosphate
  modified_base 12: mod_base = OTHER; note = 2'-O-methylguanosine-3'-phosphate
  modified_base 13: mod_base = OTHER; note = 2'-O-methyladenosine-3'-phosphate
  modified_base 14: mod_base = OTHER; note = 2'-deoxy-2'-fluoroadenosine-3'-phosphate
  modified_base 15: mod_base = OTHER; note = 2'-O-methylcytidine-3'-phosphate
  modified_base 16: mod_base = OTHER; note = 2'-deoxy-2'-fluoroadenosine-3'-phosphate
  modified_base 17: mod_base = OTHER; note = 2'-O-methylcytidine-3'-phosphate
  modified_base 18: mod_base = OTHER; note = 1-deoxy-1-(thymin-1-yl)-alpha-L-threofuranose 2-phosphate
  modified_base 19: mod_base = OTHER; note = 2'-O-methylguanosine-3'-phosphate
  modified_base 20: mod_base = OTHER; note = 2'-deoxy-2'-fluorouridine-3'-phosphate
  modified_base 21: mod_base = OTHER; note = 2'-O-methyluridine-3'-phosphorothioate
  modified_base 22: mod_base = OTHER; note = 2'-O-methyluridine-3'-phosphorothioate
  modified_base 23: mod_base = OTHER; note = 2'-O-methyluridine
ttatagagcaagaacactgtttt

SEQ ID NO: 256 - RNA, 23 nt, synthetic construct
  source 1..23: mol_type = other RNA
  modified_base 1: mod_base = OTHER; note = 2'-O-methyluridine-3'-phosphorothioate
  modified_base 2: mod_base = OTHER; note = 2'-deoxy-2'-fluorouridine-3'-phosphorothioate
  modified_base 3: mod_base = OTHER; note = 2'-O-methyladenosine-3'-phosphate
  modified_base 4: mod_base = OTHER; note = 2'-deoxy-2'-fluorouridine-3'-phosphate
  modified_base 5: mod_base = OTHER; note = 2'-O-methyladenosine-3'-phosphate
  modified_base 6: mod_base = OTHER; note = 2'-deoxy-2'-fluoroguanosine-3'-phosphate
  modified_base 7: mod_base = OTHER; note = 2'-O-methyladenosine-3'-phosphate
  modified_base 8: mod_base = OTHER; note = 2'-deoxy-2'-fluoroguanosine-3'-phosphate
  modified_base 9: mod_base = OTHER; note = 2'-O-methylcytidine-3'-phosphate
  modified_base 10: mod_base = OTHER; note = 2'-deoxy-2'-fluoroadenosine-3'-phosphate
  modified_base 11: mod_base = OTHER; note = 2'-O-methyladenosine-3'-phosphate
  modified_base 12: mod_base = OTHER; note = 2'-O-methylguanosine-3'-phosphate
  modified_base 13: mod_base = OTHER; note = 2'-O-methyladenosine-3'-phosphate
  modified_base 14: mod_base = OTHER; note = 2'-deoxy-2'-fluoroadenosine-3'-phosphate
  modified_base 15: mod_base = OTHER; note = 2'-O-methylcytidine-3'-phosphate
  modified_base 16: mod_base = OTHER; note = 2'-deoxy-2'-fluoroadenosine-3'-phosphate
  modified_base 17: mod_base = OTHER; note = 2'-O-methylcytidine-3'-phosphate
  modified_base 18: mod_base = OTHER; note = 2'-deoxy-2'-fluorouridine-3'-phosphate
  modified_base 19: mod_base = OTHER; note = 1-deoxy-1-(guanin-9-yl)-alpha-L-threofuranose 2-phosphate
  modified_base 20: mod_base = OTHER; note = 2'-deoxy-2'-fluorouridine-3'-phosphate
  modified_base 21: mod_base = OTHER; note = 2'-O-methyluridine-3'-phosphorothioate
  modified_base 22: mod_base = OTHER; note = 2'-O-methyluridine-3'-phosphorothioate
  modified_base 23: mod_base = OTHER; note = 2'-O-methyluridine
ttatagagcaagaacactgtttt

SEQ ID NO: 257 - RNA, 23 nt, synthetic construct
  source 1..23: mol_type = other RNA
  modified_base 1: mod_base = OTHER; note = 2'-O-methyluridine-3'-phosphorothioate
  modified_base 2: mod_base = OTHER; note = 2'-deoxy-2'-fluorouridine-3'-phosphorothioate
  modified_base 3: mod_base = OTHER; note = 2'-O-methyladenosine-3'-phosphate
  modified_base 4: mod_base = OTHER; note = 2'-deoxy-2'-fluorouridine-3'-phosphate
  modified_base 5: mod_base = OTHER; note = 2'-O-methyladenosine-3'-phosphate
  modified_base 6: mod_base = OTHER; note = 2'-deoxy-2'-fluoroguanosine-3'-phosphate
  modified_base 7: mod_base = OTHER; note = 2'-O-methyladenosine-3'-phosphate
  modified_base 8: mod_base = OTHER; note = 2'-deoxy-2'-fluoroguanosine-3'-phosphate
  modified_base 9: mod_base = OTHER; note = 2'-O-methylcytidine-3'-phosphate
  modified_base 10: mod_base = OTHER; note = 2'-deoxy-2'-fluoroadenosine-3'-phosphate
  modified_base 11: mod_base = OTHER; note = 2'-O-methyladenosine-3'-phosphate
  modified_base 12: mod_base = OTHER; note = 2'-O-methylguanosine-3'-phosphate
  modified_base 13: mod_base = OTHER; note = 2'-O-methyladenosine-3'-phosphate
  modified_base 14: mod_base = OTHER; note = 2'-deoxy-2'-fluoroadenosine-3'-phosphate
  modified_base 15: mod_base = OTHER; note = 2'-O-methylcytidine-3'-phosphate
  modified_base 16: mod_base = OTHER; note = 2'-deoxy-2'-fluoroadenosine-3'-phosphate
  modified_base 17: mod_base = OTHER; note = 2'-O-methylcytidine-3'-phosphate
  modified_base 18: mod_base = OTHER; note = 2'-deoxy-2'-fluorouridine-3'-phosphate
  modified_base 19: mod_base = OTHER; note = 2'-O-methylguanosine-3'-phosphate
  modified_base 20: mod_base = OTHER; note = 1-deoxy-1-(thymin-1-yl)-alpha-L-threofuranose 2-phosphate
  modified_base 21: mod_base = OTHER; note = 2'-O-methyluridine-3'-phosphorothioate
  modified_base 22: mod_base = OTHER; note = 2'-O-methyluridine-3'-phosphorothioate
  modified_base 23: mod_base = OTHER; note = 2'-O-methyluridine
ttatagagcaagaacactgtttt

SEQ ID NO: 258 - RNA, 23 nt, synthetic construct
  source 1..23: mol_type = other RNA
  modified_base 1: mod_base = OTHER; note = 2'-O-methyluridine-3'-phosphorothioate
  modified_base 2: mod_base = OTHER; note = 2'-deoxy-2'-fluorouridine-3'-phosphorothioate
  modified_base 3: mod_base = OTHER; note = 2'-O-methyladenosine-3'-phosphate
  modified_base 4: mod_base = OTHER; note = 2'-deoxy-2'-fluorouridine-3'-phosphate
  modified_base 5: mod_base = OTHER; note = 2'-O-methyladenosine-3'-phosphate
  modified_base 6: mod_base = OTHER; note = 2'-deoxy-2'-fluoroguanosine-3'-phosphate
  modified_base 7: mod_base = OTHER; note = 2'-O-methyladenosine-3'-phosphate
  modified_base 8: mod_base = OTHER; note = 2'-deoxy-2'-fluoroguanosine-3'-phosphate
  modified_base 9: mod_base = OTHER; note = 2'-O-methylcytidine-3'-phosphate
  modified_base 10: mod_base = OTHER; note = 2'-deoxy-2'-fluoroadenosine-3'-phosphate
  modified_base 11: mod_base = OTHER; note = 2'-O-methyladenosine-3'-phosphate
  modified_base 12: mod_base = OTHER; note = 2'-O-methylguanosine-3'-phosphate
  modified_base 13: mod_base = OTHER; note = 2'-O-methyladenosine-3'-phosphate
  modified_base 14: mod_base = OTHER; note = 2'-deoxy-2'-fluoroadenosine-3'-phosphate
  modified_base 15: mod_base = OTHER; note = 2'-O-methylcytidine-3'-phosphate
  modified_base 16: mod_base = OTHER; note = 2'-deoxy-2'-fluoroadenosine-3'-phosphate
  modified_base 17: mod_base = OTHER; note = 2'-O-methylcytidine-3'-phosphate
  modified_base 18: mod_base = OTHER; note = 2'-deoxy-2'-fluorouridine-3'-phosphate
  modified_base 19: mod_base = OTHER; note = 2'-O-methylguanosine-3'-phosphate
  modified_base 20: mod_base = OTHER; note = 2'-deoxy-2'-fluorouridine-3'-phosphate
  modified_base 21: mod_base = OTHER; note = 1-deoxy-1-(thymin-1-yl)-alpha-L-threofuranose 2-phosphorothioate
  modified_base 22: mod_base = OTHER; note = 2'-O-methyluridine-3'-phosphorothioate
  modified_base 23: mod_base = OTHER; note = 2'-O-methyluridine
ttatagagcaagaacactgtttt

SEQ ID NO: 259 - RNA, 23 nt, synthetic construct
  source 1..23: mol_type = other RNA
  modified_base 1: mod_base = OTHER; note = 2'-O-methyluridine-3'-phosphorothioate
  modified_base 2: mod_base = OTHER; note = 2'-deoxy-2'-fluorouridine-3'-phosphorothioate
  modified_base 3: mod_base = OTHER; note = 2'-O-methyladenosine-3'-phosphate
  modified_base 4: mod_base = OTHER; note = 2'-deoxy-2'-fluorouridine-3'-phosphate
  modified_base 5: mod_base = OTHER; note = 2'-O-methyladenosine-3'-phosphate
  modified_base 6: mod_base = OTHER; note = 2'-deoxy-2'-fluoroguanosine-3'-phosphate
  modified_base 7: mod_base = OTHER; note = 2'-O-methyladenosine-3'-phosphate
  modified_base 8: mod_base = OTHER; note = 2'-deoxy-2'-fluoroguanosine-3'-phosphate
  modified_base 9: mod_base = OTHER; note = 2'-O-methylcytidine-3'-phosphate
  modified_base 10: mod_base = OTHER; note = 2'-deoxy-2'-fluoroadenosine-3'-phosphate
  modified_base 11: mod_base = OTHER; note = 2'-O-methyladenosine-3'-phosphate
  modified_base 12: mod_base = OTHER; note = 2'-O-methylguanosine-3'-phosphate
  modified_base 13: mod_base = OTHER; note = 2'-O-methyladenosine-3'-phosphate
  modified_base 14: mod_base = OTHER; note = 2'-deoxy-2'-fluoroadenosine-3'-phosphate
  modified_base 15: mod_base = OTHER; note = 2'-O-methylcytidine-3'-phosphate
  modified_base 16: mod_base = OTHER; note = 2'-deoxy-2'-fluoroadenosine-3'-phosphate
  modified_base 17: mod_base = OTHER; note = 2'-O-methylcytidine-3'-phosphate
  modified_base 18: mod_base = OTHER; note = 2'-deoxy-2'-fluorouridine-3'-phosphate
  modified_base 19: mod_base = OTHER; note = 2'-O-methylguanosine-3'-phosphate
  modified_base 20: mod_base = OTHER; note = 2'-deoxy-2'-fluorouridine-3'-phosphate
  modified_base 21: mod_base = OTHER; note = 2'-O-methyluridine-3'-phosphorothioate
  modified_base 22: mod_base = OTHER; note = 1-deoxy-1-(thymin-1-yl)-alpha-L-threofuranose 2-phosphorothioate
  modified_base 23: mod_base = OTHER; note = 2'-O-methyluridine
ttatagagcaagaacactgtttt

SEQ ID NO: 260 - RNA, 23 nt, synthetic construct
  source 1..23: mol_type = other RNA
  modified_base 1: mod_base = OTHER; note = 2'-O-methyluridine-3'-phosphorothioate
  modified_base 2: mod_base = OTHER; note = 2'-deoxy-2'-fluorouridine-3'-phosphorothioate
  modified_base 3: mod_base = OTHER; note = 2'-O-methyladenosine-3'-phosphate
  modified_base 4: mod_base = OTHER; note = 2'-deoxy-2'-fluorouridine-3'-phosphate
  modified_base 5: mod_base = OTHER; note = 2'-O-methyladenosine-3'-phosphate
  modified_base 6: mod_base = OTHER; note = 2'-deoxy-2'-fluoroguanosine-3'-phosphate
  modified_base 7: mod_base = OTHER; note = 2'-O-methyladenosine-3'-phosphate
  modified_base 8: mod_base = OTHER; note = 2'-deoxy-2'-fluoroguanosine-3'-phosphate
  modified_base 9: mod_base = OTHER; note = 2'-O-methylcytidine-3'-phosphate
  modified_base 10: mod_base = OTHER; note = 2'-deoxy-2'-fluoroadenosine-3'-phosphate
  modified_base 11: mod_base = OTHER; note = 2'-O-methyladenosine-3'-phosphate
  modified_base 12: mod_base = OTHER; note = 2'-O-methylguanosine-3'-phosphate
  modified_base 13: mod_base = OTHER; note = 2'-O-methyladenosine-3'-phosphate
  modified_base 14: mod_base = OTHER; note = 2'-deoxy-2'-fluoroadenosine-3'-phosphate
  modified_base 15: mod_base = OTHER; note = 2'-O-methylcytidine-3'-phosphate
  modified_base 16: mod_base = OTHER; note = 2'-deoxy-2'-fluoroadenosine-3'-phosphate
  modified_base 17: mod_base = OTHER; note = 2'-O-methylcytidine-3'-phosphate
  modified_base 18: mod_base = OTHER; note = 2'-deoxy-2'-fluorouridine-3'-phosphate
  modified_base 19: mod_base = OTHER; note = 2'-O-methylguanosine-3'-phosphate
  modified_base 20: mod_base = OTHER; note = 2'-deoxy-2'-fluorouridine-3'-phosphate
  modified_base 21: mod_base = OTHER; note = 2'-O-methyluridine-3'-phosphorothioate
  modified_base 22: mod_base = OTHER; note = 2'-O-methyluridine-3'-phosphorothioate
  modified_base 23: mod_base = OTHER; note = 1-deoxy-1-(thymin-1-yl)-alpha-L-threofuranose
ttatagagcaagaacactgtttt

SEQ ID NO: 261 - RNA, 23 nt, synthetic construct
  source 1..23: mol_type = other RNA
  modified_base 1: mod_base = OTHER; note = 2'-O-methyluridine-3'-phosphorothioate
  modified_base 2: mod_base = OTHER; note = 2'-deoxy-2'-fluorouridine-3'-phosphorothioate
  modified_base 3: mod_base = OTHER; note = 2'-O-methylguanosine-3'-phosphate
  modified_base 4: mod_base = OTHER; note = 2'-O-methyluridine-3'-phosphate
  modified_base 5: mod_base = OTHER; note (2S,4R)-N-acetyl-2-hydroxymethyl-4-hydroxypyrrolidine 4-phosphate
  modified_base 6: mod_base = OTHER; note = 2'-deoxy-2'-fluoroguanosine-3'-phosphate
  modified_base 7: mod_base = OTHER; note = 2'-O-methyladenosine-3'-phosphate
  modified_base 8: mod_base = OTHER; note = 2'-deoxy-2'-fluorouridine-3'-phosphate
  modified_base 9: mod_base = OTHER; note = 2'-deoxy-2'-fluoroguanosine-3'-phosphate
  modified_base 10: mod_base = OTHER; note = 2'-O-methyladenosine-3'-phosphate
  modified_base 11: mod_base = OTHER; note = 2'-O-methylcytidine-3'-phosphate
  modified_base 12: mod_base = OTHER; note = 2'-O-methyluridine-3'-phosphate
  modified_base 13: mod_base = OTHER; note = 2'-O-methyluridine-3'-phosphate
  modified_base 14: mod_base = OTHER; note = 2'-deoxy-2'-fluorouridine-3'-phosphate
  modified_base 15: mod_base = OTHER; note = 2'-O-methylcytidine-3'-phosphate
  modified_base 16: mod_base = OTHER; note = 2'-deoxy-2'-fluoroadenosine-3'-phosphate
  modified_base 17: mod_base = OTHER; note = 2'-O-methylcytidine-3'-phosphate
  modified_base 18: mod_base = OTHER; note = 2'-O-methyladenosine-3'-phosphate
  modified_base 19: mod_base = OTHER; note = 2'-O-methyluridine-3'-phosphate
  modified_base 20: mod_base = OTHER; note = 2'-O-methyluridine-3'-phosphate
  modified_base 21: mod_base = OTHER; note = 2'-O-methylcytidine-3'-phosphorothioate
  modified_base 22: mod_base = OTHER; note = 2'-O-methyluridine-3'-phosphorothioate
  modified_base 23: mod_base = OTHER; note = 2'-O-methylguanosine
ttgtngatgactttcacattctg

SEQ ID NO: 262 - RNA, 23 nt, synthetic construct
  source 1..23: mol_type = other RNA
  modified_base 1: mod_base = OTHER; note = 2'-O-methyluridine-3'-phosphorothioate
  modified_base 2: mod_base = OTHER; note = 2'-deoxy-2'-fluorouridine-3'-phosphorothioate
  modified_base 3: mod_base = OTHER; note = 2'-O-methylguanosine-3'-phosphate
  modified_base 4: mod_base = OTHER; note = 2'-O-methyluridine-3'-phosphate
  modified_base 5: mod_base = OTHER; note = 2'-O-methylcytidine-3'-phosphate
  modified_base 6: mod_base = OTHER; note (2S,4R)-N-acetyl-2-hydroxymethyl-4-hydroxypyrrolidine 4-phosphate
  modified_base 7: mod_base = OTHER; note = 2'-O-methyladenosine-3'-phosphate
  modified_base 8: mod_base = OTHER; note = 2'-deoxy-2'-fluorouridine-3'-phosphate
  modified_base 9: mod_base = OTHER; note = 2'-deoxy-2'-fluoroguanosine-3'-phosphate
  modified_base 10: mod_base = OTHER; note = 2'-O-methyladenosine-3'-phosphate
  modified_base 11: mod_base = OTHER; note = 2'-O-methylcytidine-3'-phosphate
  modified_base 12: mod_base = OTHER; note = 2'-O-methyluridine-3'-phosphate
  modified_base 13: mod_base = OTHER; note = 2'-O-methyluridine-3'-phosphate
  modified_base 14: mod_base = OTHER; note = 2'-deoxy-2'-fluorouridine-3'-phosphate
  modified_base 15: mod_base = OTHER; note = 2'-O-methylcytidine-3'-phosphate
  modified_base 16: mod_base = OTHER; note = 2'-deoxy-2'-fluoroadenosine-3'-phosphate
  modified_base 17: mod_base = OTHER; note = 2'-O-methylcytidine-3'-phosphate
  modified_base 18: mod_base = OTHER; note = 2'-O-methyladenosine-3'-phosphate
  modified_base 19: mod_base = OTHER; note = 2'-O-methyluridine-3'-phosphate
  modified_base 20: mod_base = OTHER; note = 2'-O-methyluridine-3'-phosphate
  modified_base 21: mod_base = OTHER; note = 2'-O-methylcytidine-3'-phosphorothioate
  modified_base 22: mod_base = OTHER; note = 2'-O-methyluridine-3'-phosphorothioate
  modified_base 23: mod_base = OTHER; note = 2'-O-methylguanosine
ttgtcnatgactttcacattctg

SEQ ID NO: 263 - RNA, 23 nt, synthetic construct
  source 1..23: mol_type = other RNA
  modified_base 1: mod_base = OTHER; note = 2'-O-methyluridine-3'-phosphorothioate
  modified_base 2: mod_base = OTHER; note = 2'-deoxy-2'-fluorouridine-3'-phosphorothioate
  modified_base 3: mod_base = OTHER; note = 2'-O-methylguanosine-3'-phosphate
  modified_base 4: mod_base = OTHER; note = 2'-O-methyluridine-3'-phosphate
  modified_base 5: mod_base = OTHER; note = 2'-O-methylcytidine-3'-phosphate
  modified_base 6: mod_base = OTHER; note = 2'-deoxy-2'-fluoroguanosine-3'-phosphate
  modified_base 7: mod_base = OTHER; note (2S,4R)-N-acetyl-2-hydroxymethyl-4-hydroxypyrrolidine 4-phosphate
  modified_base 8: mod_base = OTHER; note = 2'-deoxy-2'-fluorouridine-3'-phosphate
  modified_base 9: mod_base = OTHER; note = 2'-deoxy-2'-fluoroguanosine-3'-phosphate
  modified_base 10: mod_base = OTHER; note = 2'-O-methyladenosine-3'-phosphate
  modified_base 11: mod_base = OTHER; note = 2'-O-methylcytidine-3'-phosphate
  modified_base 12: mod_base = OTHER; note = 2'-O-methyluridine-3'-phosphate
  modified_base 13: mod_base = OTHER; note = 2'-O-methyluridine-3'-phosphate
  modified_base 14: mod_base = OTHER; note = 2'-deoxy-2'-fluorouridine-3'-phosphate
  modified_base 15: mod_base = OTHER; note = 2'-O-methylcytidine-3'-phosphate
  modified_base 16: mod_base = OTHER; note = 2'-deoxy-2'-fluoroadenosine-3'-phosphate
  modified_base 17: mod_base = OTHER; note = 2'-O-methylcytidine-3'-phosphate
  modified_base 18: mod_base = OTHER; note = 2'-O-methyladenosine-3'-phosphate
  modified_base 19: mod_base = OTHER; note = 2'-O-methyluridine-3'-phosphate
  modified_base 20: mod_base = OTHER; note = 2'-O-methyluridine-3'-phosphate
  modified_base 21: mod_base = OTHER; note = 2'-O-methylcytidine-3'-phosphorothioate
  modified_base 22: mod_base = OTHER; note = 2'-O-methyluridine-3'-phosphorothioate
  modified_base 23: mod_base = OTHER; note = 2'-O-methylguanosine
ttgtcgntgactttcacattctg

SEQ ID NO: 264 - RNA, 23 nt, synthetic construct
  source 1..23: mol_type = other RNA
  modified_base 1: mod_base = OTHER; note = 2'-O-methyluridine-3'-phosphorothioate
  modified_base 2: mod_base = OTHER; note = 2'-deoxy-2'-fluorouridine-3'-phosphorothioate
  modified_base 3: mod_base = OTHER; note = 2'-O-methylguanosine-3'-phosphate
  modified_base 4: mod_base = OTHER; note = 2'-O-methyluridine-3'-phosphate
  modified_base 5: mod_base = OTHER; note = 2'-O-methylcytidine-3'-phosphate
  modified_base 6: mod_base = OTHER; note = 2'-deoxy-2'-fluoroguanosine-3'-phosphate
  modified_base 7: mod_base = OTHER; note = 2'-O-methyladenosine-3'-phosphate
  modified_base 8: mod_base = OTHER; note (2S,4R)-N-acetyl-2-hydroxymethyl-4-hydroxypyrrolidine 4-phosphate
  modified_base 9: mod_base = OTHER; note = 2'-deoxy-2'-fluoroguanosine-3'-phosphate
  modified_base 10: mod_base = OTHER; note = 2'-O-methyladenosine-3'-phosphate
  modified_base 11: mod_base = OTHER; note = 2'-O-methylcytidine-3'-phosphate
  modified_base 12: mod_base = OTHER; note = 2'-O-methyluridine-3'-phosphate
  modified_base 13: mod_base = OTHER; note = 2'-O-methyluridine-3'-phosphate
  modified_base 14: mod_base = OTHER; note = 2'-deoxy-2'-fluorouridine-3'-phosphate
  modified_base 15: mod_base = OTHER; note = 2'-O-methylcytidine-3'-phosphate
  modified_base 16: mod_base = OTHER; note = 2'-deoxy-2'-fluoroadenosine-3'-phosphate
  modified_base 17: mod_base = OTHER; note = 2'-O-methylcytidine-3'-phosphate
  modified_base 18: mod_base = OTHER; note = 2'-O-methyladenosine-3'-phosphate
  modified_base 19: mod_base = OTHER; note = 2'-O-methyluridine-3'-phosphate
  modified_base 20: mod_base = OTHER; note = 2'-O-methyluridine-3'-phosphate
  modified_base 21: mod_base = OTHER; note = 2'-O-methylcytidine-3'-phosphorothioate
  modified_base 22: mod_base = OTHER; note = 2'-O-methyluridine-3'-phosphorothioate
  modified_base 23: mod_base = OTHER; note = 2'-O-methylguanosine
ttgtcgangactttcacattctg

SEQ ID NO: 265 - RNA, 23 nt, synthetic construct
  source 1..23: mol_type = other RNA
  modified_base 1: mod_base = OTHER; note = 2'-O-methyluridine-3'-phosphorothioate
  modified_base 2: mod_base = OTHER; note = 2'-deoxy-2'-fluorouridine-3'-phosphorothioate
  modified_base 3: mod_base = OTHER; note = 2'-O-methyladenosine-3'-phosphate
  modified_base 4: mod_base = OTHER; note = 2'-O-methyluridine-3'-phosphate
  modified_base 5: mod_base = OTHER; note (2S,4R)-N-acetyl-2-hydroxymethyl-4-hydroxypyrrolidine 4-phosphate
  modified_base 6: mod_base = OTHER; note = 2'-deoxy-2'-fluoroguanosine-3'-phosphate
  modified_base 7: mod_base = OTHER; note = 2'-O-methyladenosine-3'-phosphate
  modified_base 8: mod_base = OTHER; note = 2'-O-methylguanosine-3'-phosphate
  modified_base 9: mod_base = OTHER; note = 2'-O-methylcytidine-3'-phosphate
  modified_base 10: mod_base = OTHER; note = 2'-O-methyladenosine-3'-phosphate
  modified_base 11: mod_base = OTHER; note = 2'-O-methyladenosine-3'-phosphate
  modified_base 12: mod_base = OTHER; note = 2'-O-methylguanosine-3'-phosphate
  modified_base 13: mod_base = OTHER; note = 2'-O-methyladenosine-3'-phosphate
  modified_base 14: mod_base = OTHER; note = 2'-deoxy-2'-fluoroadenosine-3'-phosphate
  modified_base 15: mod_base = OTHER; note = 2'-O-methylcytidine-3'-phosphate
  modified_base 16: mod_base = OTHER; note = 2'-deoxy-2'-fluoroadenosine-3'-phosphate
  modified_base 17: mod_base = OTHER; note = 2'-O-methylcytidine-3'-phosphate
  modified_base 18: mod_base = OTHER; note = 2'-O-methyluridine-3'-phosphate
  modified_base 19: mod_base = OTHER; note = 2'-O-methylguanosine-3'-phosphate
  modified_base 20: mod_base = OTHER; note = 2'-O-methyluridine-3'-phosphate
  modified_base 21: mod_base = OTHER; note = 2'-O-methyluridine-3'-phosphorothioate
  modified_base 22: mod_base = OTHER; note = 2'-O-methyluridine-3'-phosphorothioate
  modified_base 23: mod_base = OTHER; note = 2'-O-methyluridine
ttatngagcaagaacactgtttt

SEQ ID NO: 266 - RNA, 23 nt, synthetic construct
  source 1..23: mol_type = other RNA
  modified_base 1: mod_base = OTHER; note = 2'-O-methyluridine-3'-phosphorothioate
  modified_base 2: mod_base = OTHER; note = 2'-deoxy-2'-fluorouridine-3'-phosphorothioate
  modified_base 3: mod_base = OTHER; note = 2'-O-methyladenosine-3'-phosphate
  modified_base 4: mod_base = OTHER; note = 2'-O-methyluridine-3'-phosphate
  modified_base 5: mod_base = OTHER; note = 2'-O-methyladenosine-3'-phosphate
  modified_base 6: mod_base = OTHER; note (2S,4R)-N-acetyl-2-hydroxymethyl-4-hydroxypyrrolidine 4-phosphate
  modified_base 7: mod_base = OTHER; note = 2'-O-methyladenosine-3'-phosphate
  modified_base 8: mod_base = OTHER; note = 2'-O-methylguanosine-3'-phosphate
  modified_base 9: mod_base = OTHER; note = 2'-O-methylcytidine-3'-phosphate
  modified_base 10: mod_base = OTHER; note = 2'-O-methyladenosine-3'-phosphate
  modified_base 11: mod_base = OTHER; note = 2'-O-methyladenosine-3'-phosphate
  modified_base 12: mod_base = OTHER; note = 2'-O-methylguanosine-3'-phosphate
  modified_base 13: mod_base = OTHER; note = 2'-O-methyladenosine-3'-phosphate
  modified_base 14: mod_base = OTHER; note = 2'-deoxy-2'-fluoroadenosine-3'-phosphate
  modified_base 15: mod_base = OTHER; note = 2'-O-methylcytidine-3'-phosphate
  modified_base 16: mod_base = OTHER; note = 2'-deoxy-2'-fluoroadenosine-3'-phosphate
  modified_base 17: mod_base = OTHER; note = 2'-O-methylcytidine-3'-phosphate
  modified_base 18: mod_base = OTHER; note = 2'-O-methyluridine-3'-phosphate
  modified_base 19: mod_base = OTHER; note = 2'-O-methylguanosine-3'-phosphate
  modified_base 20: mod_base = OTHER; note = 2'-O-methyluridine-3'-phosphate
  modified_base 21: mod_base = OTHER; note = 2'-O-methyluridine-3'-phosphorothioate
  modified_base 22: mod_base = OTHER; note = 2'-O-methyluridine-3'-phosphorothioate
  modified_base 23: mod_base = OTHER; note = 2'-O-methyluridine
ttatanagcaagaacactgtttt

SEQ ID NO: 267 - RNA, 23 nt, synthetic construct
  source 1..23: mol_type = other RNA
  modified_base 1: mod_base = OTHER; note = 2'-O-methyluridine-3'-phosphorothioate
  modified_base 2: mod_base = OTHER; note = 2'-deoxy-2'-fluorouridine-3'-phosphorothioate
  modified_base 3: mod_base = OTHER; note = 2'-O-methyladenosine-3'-phosphate
  modified_base 4: mod_base = OTHER; note = 2'-O-methyluridine-3'-phosphate
  modified_base 5: mod_base = OTHER; note = 2'-O-methyladenosine-3'-phosphate
  modified_base 6: mod_base = OTHER; note = 2'-deoxy-2'-fluoroguanosine-3'-phosphate
  modified_base 7: mod_base = OTHER; note (2S,4R)-N-acetyl-2-hydroxymethyl-4-hydroxypyrrolidine 4-phosphate
  modified_base 8: mod_base = OTHER; note = 2'-O-methylguanosine-3'-phosphate
  modified_base 9: mod_base = OTHER; note = 2'-O-methylcytidine-3'-phosphate
  modified_base 10: mod_base = OTHER; note = 2'-O-methyladenosine-3'-phosphate
  modified_base 11: mod_base = OTHER; note = 2'-O-methyladenosine-3'-phosphate
  modified_base 12: mod_base = OTHER; note = 2'-O-methylguanosine-3'-phosphate
  modified_base 13: mod_base = OTHER; note = 2'-O-methyladenosine-3'-phosphate
  modified_base 14: mod_base = OTHER; note = 2'-deoxy-2'-fluoroadenosine-3'-phosphate
  modified_base 15: mod_base = OTHER; note = 2'-O-methylcytidine-3'-phosphate
  modified_base 16: mod_base = OTHER; note = 2'-deoxy-2'-fluoroadenosine-3'-phosphate
  modified_base 17: mod_base = OTHER; note = 2'-O-methylcytidine-3'-phosphate
  modified_base 18: mod_base = OTHER; note = 2'-O-methyluridine-3'-phosphate
  modified_base 19: mod_base = OTHER; note = 2'-O-methylguanosine-3'-phosphate
  modified_base 20: mod_base = OTHER; note = 2'-O-methyluridine-3'-phosphate
  modified_base 21: mod_base = OTHER; note = 2'-O-methyluridine-3'-phosphorothioate
  modified_base 22: mod_base = OTHER; note = 2'-O-methyluridine-3'-phosphorothioate
  modified_base 23: mod_base = OTHER; note = 2'-O-methyluridine
ttatagngcaagaacactgtttt

SEQ ID NO: 268 - RNA, 23 nt, synthetic construct
  source 1..23: mol_type = other RNA
  modified_base 1: mod_base = OTHER; note = 2'-O-methyluridine-3'-phosphorothioate
  modified_base 2: mod_base = OTHER; note = 2'-deoxy-2'-fluorouridine-3'-phosphorothioate
  modified_base 3: mod_base = OTHER; note = 2'-O-methyladenosine-3'-phosphate
  modified_base 4: mod_base = OTHER; note = 2'-O-methyluridine-3'-phosphate
  modified_base 5: mod_base = OTHER; note = 2'-O-methyladenosine-3'-phosphate
  modified_base 6: mod_base = OTHER; note = 2'-deoxy-2'-fluoroguanosine-3'-phosphate
  modified_base 7: mod_base = OTHER; note = 2'-O-methyladenosine-3'-phosphate
  modified_base 8: mod_base = OTHER; note (2S,4R)-N-acetyl-2-hydroxymethyl-4-hydroxypyrrolidine 4-phosphate
  modified_base 9: mod_base = OTHER; note = 2'-O-methylcytidine-3'-phosphate
  modified_base 10: mod_base = OTHER; note = 2'-O-methyladenosine-3'-phosphate
  modified_base 11: mod_base = OTHER; note = 2'-O-methyladenosine-3'-phosphate
  modified_base 12: mod_base = OTHER; note = 2'-O-methylguanosine-3'-phosphate
  modified_base 13: mod_base = OTHER; note = 2'-O-methyladenosine-3'-phosphate
  modified_base 14: mod_base = OTHER; note = 2'-deoxy-2'-fluoroadenosine-3'-phosphate
  modified_base 15: mod_base = OTHER; note = 2'-O-methylcytidine-3'-phosphate
  modified_base 16: mod_base = OTHER; note = 2'-deoxy-2'-fluoroadenosine-3'-phosphate
  modified_base 17: mod_base = OTHER; note = 2'-O-methylcytidine-3'-phosphate
  modified_base 18: mod_base = OTHER; note = 2'-O-methyluridine-3'-phosphate
  modified_base 19: mod_base = OTHER; note = 2'-O-methylguanosine-3'-phosphate
  modified_base 20: mod_base = OTHER; note = 2'-O-methyluridine-3'-phosphate
  modified_base 21: mod_base = OTHER; note = 2'-O-methyluridine-3'-phosphorothioate
  modified_base 22: mod_base = OTHER; note = 2'-O-methyluridine-3'-phosphorothioate
  modified_base 23: mod_base = OTHER; note = 2'-O-methyluridine
ttatagancaagaacactgtttt

SEQ ID NO: 269 - RNA, 24 nt, synthetic construct
  source 1..24: mol_type = other RNA
  modified_base 1: mod_base = OTHER; note = 2'-O-methyluridine-3'-phosphorothioate
  modified_base 2: mod_base = OTHER; note = 2'-deoxy-2'-fluorouridine-3'-phosphorothioate
  modified_base 3: mod_base = OTHER; note (2S,4R)-N-(2-(adenin-9-yl)-1-oxoethyl)-2-hydroxymethyl-4-hy droxypyrrolidine 4-phosphate
  modified_base 4: mod_base = OTHER; note = 2'-O-methyladenosine-3'-phosphate
  modified_base 5: mod_base = OTHER; note = 2'-O-methyluridine-3'-phosphate
  modified_base 6: mod_base = OTHER; note = 2'-O-methyladenosine-3'-phosphate
  modified_base 7: mod_base = OTHER; note = 2'-deoxy-2'-fluoroguanosine-3'-phosphate
  modified_base 8: mod_base = OTHER; note = 2'-O-methyladenosine-3'-phosphate
  modified_base 9: mod_base = OTHER; note = 2'-O-methylguanosine-3'-phosphate
  modified_base 10: mod_base = OTHER; note = 2'-O-methylcytidine-3'-phosphate
  modified_base 11: mod_base = OTHER; note = 2'-O-methyladenosine-3'-phosphate
  modified_base 12: mod_base = OTHER; note = 2'-O-methyladenosine-3'-phosphate
  modified_base 13: mod_base = OTHER; note = 2'-O-methylguanosine-3'-phosphate
  modified_base 14: mod_base = OTHER; note = 2'-O-methyladenosine-3'-phosphate
  modified_base 15: mod_base = OTHER; note = 2'-deoxy-2'-fluoroadenosine-3'-phosphate
  modified_base 16: mod_base = OTHER; note = 2'-O-methylcytidine-3'-phosphate
  modified_base 17: mod_base = OTHER; note = 2'-deoxy-2'-fluoroadenosine-3'-phosphate
  modified_base 18: mod_base = OTHER; note = 2'-O-methylcytidine-3'-phosphate
  modified_base 19: mod_base = OTHER; note = 2'-O-methyluridine-3'-phosphate
  modified_base 20: mod_base = OTHER; note = 2'-O-methylguanosine-3'-phosphate
  modified_base 21: mod_base = OTHER; note = 2'-O-methyluridine-3'-phosphate
  modified_base 22: mod_base = OTHER; note = 2'-O-methyluridine-3'-phosphorothioate
  modified_base 23: mod_base = OTHER; note = 2'-O-methyluridine-3'-phosphorothioate
  modified_base 24: mod_base = OTHER; note = 2'-O-methyluridine
ttaatagagcaagaacactgtttt

SEQ ID NO: 270 - RNA, 23 nt, synthetic construct
  source 1..23: mol_type = other RNA
  modified_base 1: mod_base = OTHER; note = 2'-O-methyluridine-3'-phosphorothioate
  modified_base 2: mod_base = OTHER; note = 2'-deoxy-2'-fluorouridine-3'-phosphorothioate
  modified_base 3: mod_base = OTHER; note (2S,4R)-N-acetyl-2-hydroxymethyl-4-hydroxypyrrolidine 4-phosphate
  modified_base 4: mod_base = OTHER; note = 2'-O-methyluridine-3'-phosphate
  modified_base 5: mod_base = OTHER; note = 2'-O-methyladenosine-3'-phosphate
  modified_base 6: mod_base = OTHER; note = 2'-deoxy-2'-fluoroguanosine-3'-phosphate
  modified_base 7: mod_base = OTHER; note = 2'-O-methyladenosine-3'-phosphate
  modified_base 8: mod_base = OTHER; note = 2'-O-methylguanosine-3'-phosphate
  modified_base 9: mod_base = OTHER; note = 2'-O-methylcytidine-3'-phosphate
  modified_base 10: mod_base = OTHER; note = 2'-O-methyladenosine-3'-phosphate
  modified_base 11: mod_base = OTHER; note = 2'-O-methyladenosine-3'-phosphate
  modified_base 12: mod_base = OTHER; note = 2'-O-methylguanosine-3'-phosphate
  modified_base 13: mod_base = OTHER; note = 2'-O-methyladenosine-3'-phosphate
  modified_base 14: mod_base = OTHER; note = 2'-deoxy-2'-fluoroadenosine-3'-phosphate
  modified_base 15: mod_base = OTHER; note = 2'-O-methylcytidine-3'-phosphate
  modified_base 16: mod_base = OTHER; note = 2'-deoxy-2'-fluoroadenosine-3'-phosphate
  modified_base 17: mod_base = OTHER; note = 2'-O-methylcytidine-3'-phosphate
  modified_base 18: mod_base = OTHER; note = 2'-O-methyluridine-3'-phosphate
  modified_base 19: mod_base = OTHER; note = 2'-O-methylguanosine-3'-phosphate
  modified_base 20: mod_base = OTHER; note = 2'-O-methyluridine-3'-phosphate
  modified_base 21: mod_base = OTHER; note = 2'-O-methyluridine-3'-phosphorothioate
  modified_base 22: mod_base = OTHER; note = 2'-O-methyluridine-3'-phosphorothioate
  modified_base 23: mod_base = OTHER; note = 2'-O-methyluridine
ttntagagcaagaacactgtttt

SEQ ID NO: 271 - RNA, 23 nt, synthetic construct
  source 1..23: mol_type = other RNA
  modified_base 1: mod_base = OTHER; note = 2'-O-methyluridine-3'-phosphorothioate
  modified_base 2: mod_base = OTHER; note = 2'-deoxy-2'-fluorouridine-3'-phosphorothioate
  modified_base 3: mod_base = OTHER; note = 2'-O-methyladenosine-3'-phosphate
  modified_base 4: mod_base = OTHER; note (2S,4R)-N-(2-(thymin-1-yl)-1-oxoethyl)-2-hydroxymethyl-4-hy droxypyrrolidine 4-phosphate
  modified_base 5: mod_base = OTHER; note = 2'-O-methyladenosine-3'-phosphate
  modified_base 6: mod_base = OTHER; note = 2'-deoxy-2'-fluoroguanosine-3'-phosphate
  modified_base 7: mod_base = OTHER; note = 2'-O-methyladenosine-3'-phosphate
  modified_base 8: mod_base = OTHER; note = 2'-O-methylguanosine-3'-phosphate
  modified_base 9: mod_base = OTHER; note = 2'-O-methylcytidine-3'-phosphate
  modified_base 10: mod_base = OTHER; note = 2'-O-methyladenosine-3'-phosphate
  modified_base 11: mod_base = OTHER; note = 2'-O-methyladenosine-3'-phosphate
  modified_base 12: mod_base = OTHER; note = 2'-O-methylguanosine-3'-phosphate
  modified_base 13: mod_base = OTHER; note = 2'-O-methyladenosine-3'-phosphate
  modified_base 14: mod_base = OTHER; note = 2'-deoxy-2'-fluoroadenosine-3'-phosphate
  modified_base 15: mod_base = OTHER; note = 2'-O-methylcytidine-3'-phosphate
  modified_base 16: mod_base = OTHER; note = 2'-deoxy-2'-fluoroadenosine-3'-phosphate
  modified_base 17: mod_base = OTHER; note = 2'-O-methylcytidine-3'-phosphate
  modified_base 18: mod_base = OTHER; note = 2'-O-methyluridine-3'-phosphate
  modified_base 19: mod_base = OTHER; note = 2'-O-methylguanosine-3'-phosphate
  modified_base 20: mod_base = OTHER; note = 2'-O-methyluridine-3'-phosphate
  modified_base 21: mod_base = OTHER; note = 2'-O-methyluridine-3'-phosphorothioate
  modified_base 22: mod_base = OTHER; note = 2'-O-methyluridine-3'-phosphorothioate
  modified_base 23: mod_base = OTHER; note = 2'-O-methyluridine
ttatagagcaagaacactgtttt

SEQ ID NO: 272 - RNA, 23 nt, synthetic construct
  source 1..23: mol_type = other RNA
  modified_base 1: mod_base = OTHER; note = 2'-O-methyluridine-3'-phosphorothioate
  modified_base 2: mod_base = OTHER; note = 2'-deoxy-2'-fluorouridine-3'-phosphorothioate
  modified_base 3: mod_base = OTHER; note = 2'-O-methyladenosine-3'-phosphate
  modified_base 4: mod_base = OTHER; note (2S,4R)-N-acetyl-2-hydroxymethyl-4-hydroxypyrrolidine 4-phosphate
  modified_base 5: mod_base = OTHER; note = 2'-O-methyladenosine-3'-phosphate
  modified_base 6: mod_base = OTHER; note = 2'-deoxy-2'-fluoroguanosine-3'-phosphate
  modified_base 7: mod_base = OTHER; note = 2'-O-methyladenosine-3'-phosphate
  modified_base 8: mod_base = OTHER; note = 2'-O-methylguanosine-3'-phosphate
  modified_base 9: mod_base = OTHER; note = 2'-O-methylcytidine-3'-phosphate
  modified_base 10: mod_base = OTHER; note = 2'-O-methyladenosine-3'-phosphate
  modified_base 11: mod_base = OTHER; note = 2'-O-methyladenosine-3'-phosphate
  modified_base 12: mod_base = OTHER; note = 2'-O-methylguanosine-3'-phosphate
  modified_base 13: mod_base = OTHER; note = 2'-O-methyladenosine-3'-phosphate
  modified_base 14: mod_base = OTHER; note = 2'-deoxy-2'-fluoroadenosine-3'-phosphate
  modified_base 15: mod_base = OTHER; note = 2'-O-methylcytidine-3'-phosphate
  modified_base 16: mod_base = OTHER; note = 2'-deoxy-2'-fluoroadenosine-3'-phosphate
  modified_base 17: mod_base = OTHER; note = 2'-O-methylcytidine-3'-phosphate
  modified_base 18: mod_base = OTHER; note = 2'-O-methyluridine-3'-phosphate
  modified_base 19: mod_base = OTHER; note = 2'-O-methylguanosine-3'-phosphate
  modified_base 20: mod_base = OTHER; note = 2'-O-methyluridine-3'-phosphate
  modified_base 21: mod_base = OTHER; note = 2'-O-methyluridine-3'-phosphorothioate
  modified_base 22: mod_base = OTHER; note = 2'-O-methyluridine-3'-phosphorothioate
  modified_base 23: mod_base = OTHER; note = 2'-O-methyluridine
ttanagagcaagaacactgtttt

SEQ ID NO: 273 - RNA, 23 nt, synthetic construct
  source 1..23: mol_type = other RNA
  modified_base 1: mod_base = OTHER; note = 2'-O-methyluridine-3'-phosphorothioate
  modified_base 2: mod_base = OTHER; note = 2'-deoxy-2'-fluorouridine-3'-phosphorothioate
  modified_base 3: mod_base = OTHER; note = 2'-O-methyladenosine-3'-phosphate
  modified_base 4: mod_base = OTHER; note = 2'-O-methyluridine-3'-phosphate
  modified_base 5: mod_base = OTHER; note (2S,4R)-N-(2-(adenin-9-yl)-1-oxoethyl)-2-hydroxymethyl-4-hy droxypyrrolidine 4-phosphate
  modified_base 6: mod_base = OTHER; note = 2'-deoxy-2'-fluoroguanosine-3'-phosphate
  modified_base 7: mod_base = OTHER; note = 2'-O-methyladenosine-3'-phosphate
  modified_base 8: mod_base = OTHER; note = 2'-O-methylguanosine-3'-phosphate
  modified_base 9: mod_base = OTHER; note = 2'-O-methylcytidine-3'-phosphate
  modified_base 10: mod_base = OTHER; note = 2'-O-methyladenosine-3'-phosphate
  modified_base 11: mod_base = OTHER; note = 2'-O-methyladenosine-3'-phosphate
  modified_base 12: mod_base = OTHER; note = 2'-O-methylguanosine-3'-phosphate
  modified_base 13: mod_base = OTHER; note = 2'-O-methyladenosine-3'-phosphate
  modified_base 14: mod_base = OTHER; note = 2'-deoxy-2'-fluoroadenosine-3'-phosphate
  modified_base 15: mod_base = OTHER; note = 2'-O-methylcytidine-3'-phosphate
  modified_base 16: mod_base = OTHER; note = 2'-deoxy-2'-fluoroadenosine-3'-phosphate
  modified_base 17: mod_base = OTHER; note = 2'-O-methylcytidine-3'-phosphate
  modified_base 18: mod_base = OTHER; note = 2'-O-methyluridine-3'-phosphate
  modified_base 19: mod_base = OTHER; note = 2'-O-methylguanosine-3'-phosphate
  modified_base 20: mod_base = OTHER; note = 2'-O-methyluridine-3'-phosphate
  modified_base 21: mod_base = OTHER; note = 2'-O-methyluridine-3'-phosphorothioate
  modified_base 22: mod_base = OTHER; note = 2'-O-methyluridine-3'-phosphorothioate
  modified_base 23: mod_base = OTHER; note = 2'-O-methyluridine
ttatagagcaagaacactgtttt

SEQ ID NO: 274 - RNA, 23 nt, synthetic construct
  source 1..23: mol_type = other RNA
  modified_base 1: mod_base = OTHER; note = 2'-O-methyluridine-3'-phosphorothioate
  modified_base 2: mod_base = OTHER; note = 2'-deoxy-2'-fluorouridine-3'-phosphorothioate
  modified_base 3: mod_base = OTHER; note = 2'-O-methyladenosine-3'-phosphate
  modified_base 4: mod_base = OTHER; note = 2'-O-methyluridine-3'-phosphate
  modified_base 5: mod_base = OTHER; note = 2'-O-methyladenosine-3'-phosphate
  modified_base 6: mod_base = OTHER; note (2S,4R)-N-(2-(guanin-9-yl)-1-oxoethyl)-2-hydroxymethyl-4-hy droxypyrrolidine 4-phosphate
  modified_base 7: mod_base = OTHER; note = 2'-O-methyladenosine-3'-phosphate
  modified_base 8: mod_base = OTHER; note = 2'-O-methylguanosine-3'-phosphate
  modified_base 9: mod_base = OTHER; note = 2'-O-methylcytidine-3'-phosphate
  modified_base 10: mod_base = OTHER; note = 2'-O-methyladenosine-3'-phosphate
  modified_base 11: mod_base = OTHER; note = 2'-O-methyladenosine-3'-phosphate
  modified_base 12: mod_base = OTHER; note = 2'-O-methylguanosine-3'-phosphate
  modified_base 13: mod_base = OTHER; note = 2'-O-methyladenosine-3'-phosphate
  modified_base 14: mod_base = OTHER; note = 2'-deoxy-2'-fluoroadenosine-3'-phosphate
  modified_base 15: mod_base = OTHER; note = 2'-O-methylcytidine-3'-phosphate
  modified_base 16: mod_base = OTHER; note = 2'-deoxy-2'-fluoroadenosine-3'-phosphate
  modified_base 17: mod_base = OTHER; note = 2'-O-methylcytidine-3'-phosphate
  modified_base 18: mod_base = OTHER; note = 2'-O-methyluridine-3'-phosphate
  modified_base 19: mod_base = OTHER; note = 2'-O-methylguanosine-3'-phosphate
  modified_base 20: mod_base = OTHER; note = 2'-O-methyluridine-3'-phosphate
  modified_base 21: mod_base = OTHER; note = 2'-O-methyluridine-3'-phosphorothioate
  modified_base 22: mod_base = OTHER; note = 2'-O-methyluridine-3'-phosphorothioate
  modified_base 23: mod_base = OTHER; note = 2'-O-methyluridine
ttatagagcaagaacactgtttt

SEQ ID NO: 275 - RNA, 23 nt, synthetic construct
  source 1..23: mol_type = other RNA
  modified_base 1: mod_base = OTHER; note = 2'-O-methyluridine-3'-phosphorothioate
  modified_base 2: mod_base = OTHER; note = 2'-deoxy-2'-fluorouridine-3'-phosphorothioate
  modified_base 3: mod_base = OTHER; note = 2'-O-methyladenosine-3'-phosphate
  modified_base 4: mod_base = OTHER; note = 2'-O-methyluridine-3'-phosphate
  modified_base 5: mod_base = OTHER; note = 2'-O-methyladenosine-3'-phosphate
  modified_base 6: mod_base = OTHER; note = 2'-deoxy-2'-fluoroguanosine-3'-phosphate
  modified_base 7: mod_base = OTHER; note (2S,4R)-N-(2-(adenin-9-yl)-1-oxoethyl)-2-hydroxymethyl-4-hy droxypyrrolidine 4-phosphate
  modified_base 8: mod_base = OTHER; note = 2'-O-methylguanosine-3'-phosphate
  modified_base 9: mod_base = OTHER; note = 2'-O-methylcytidine-3'-phosphate
  modified_base 10: mod_base = OTHER; note = 2'-O-methyladenosine-3'-phosphate
  modified_base 11: mod_base = OTHER; note = 2'-O-methyladenosine-3'-phosphate
  modified_base 12: mod_base = OTHER; note = 2'-O-methylguanosine-3'-phosphate
  modified_base 13: mod_base = OTHER; note = 2'-O-methyladenosine-3'-phosphate
  modified_base 14: mod_base = OTHER; note = 2'-deoxy-2'-fluoroadenosine-3'-phosphate
  modified_base 15: mod_base = OTHER; note = 2'-O-methylcytidine-3'-phosphate
  modified_base 16: mod_base = OTHER; note = 2'-deoxy-2'-fluoroadenosine-3'-phosphate
  modified_base 17: mod_base = OTHER; note = 2'-O-methylcytidine-3'-phosphate
  modified_base 18: mod_base = OTHER; note = 2'-O-methyluridine-3'-phosphate
  modified_base 19: mod_base = OTHER; note = 2'-O-methylguanosine-3'-phosphate
  modified_base 20: mod_base = OTHER; note = 2'-O-methyluridine-3'-phosphate
  modified_base 21: mod_base = OTHER; note = 2'-O-methyluridine-3'-phosphorothioate
  modified_base 22: mod_base = OTHER; note = 2'-O-methyluridine-3'-phosphorothioate
  modified_base 23: mod_base = OTHER; note = 2'-O-methyluridine
ttatagagcaagaacactgtttt

SEQ ID NO: 276 - RNA, 23 nt, synthetic construct
  source 1..23: mol_type = other RNA
  modified_base 1: mod_base = OTHER; note = 2'-O-methyluridine-3'-phosphorothioate
  modified_base 2: mod_base = OTHER; note = 2'-deoxy-2'-fluorouridine-3'-phosphorothioate
  modified_base 3: mod_base = OTHER; note = 2'-O-methyladenosine-3'-phosphate
  modified_base 4: mod_base = OTHER; note = 2'-O-methyluridine-3'-phosphate
  modified_base 5: mod_base = OTHER; note = 2'-O-methyladenosine-3'-phosphate
  modified_base 6: mod_base = OTHER; note = 2'-deoxy-2'-fluoroguanosine-3'-phosphate
  modified_base 7: mod_base = OTHER; note = 2'-O-methyladenosine-3'-phosphate
  modified_base 8: mod_base = OTHER; note (2S,4R)-N-(2-(guanin-9-yl)-1-oxoethyl)-2-hydroxymethyl-4-hy droxypyrrolidine 4-phosphate
  modified_base 9: mod_base = OTHER; note = 2'-O-methylcytidine-3'-phosphate
  modified_base 10: mod_base = OTHER; note = 2'-O-methyladenosine-3'-phosphate
  modified_base 11: mod_base = OTHER; note = 2'-O-methyladenosine-3'-phosphate
  modified_base 12: mod_base = OTHER; note = 2'-O-methylguanosine-3'-phosphate
  modified_base 13: mod_base = OTHER; note = 2'-O-methyladenosine-3'-phosphate
  modified_base 14: mod_base = OTHER; note = 2'-deoxy-2'-fluoroadenosine-3'-phosphate
  modified_base 15: mod_base = OTHER; note = 2'-O-methylcytidine-3'-phosphate
  modified_base 16: mod_base = OTHER; note = 2'-deoxy-2'-fluoroadenosine-3'-phosphate
  modified_base 17: mod_base = OTHER; note = 2'-O-methylcytidine-3'-phosphate
  modified_base 18: mod_base = OTHER; note = 2'-O-methyluridine-3'-phosphate
  modified_base 19: mod_base = OTHER; note = 2'-O-methylguanosine-3'-phosphate
  modified_base 20: mod_base = OTHER; note = 2'-O-methyluridine-3'-phosphate
  modified_base 21: mod_base = OTHER; note = 2'-O-methyluridine-3'-phosphorothioate
  modified_base 22: mod_base = OTHER; note = 2'-O-methyluridine-3'-phosphorothioate
  modified_base 23: mod_base = OTHER; note = 2'-O-methyluridine
ttatagagcaagaacactgtttt

SEQ ID NO: 277 - RNA, 23 nt, synthetic construct
  source 1..23: mol_type = other RNA
  modified_base 1: mod_base = OTHER; note = 2'-O-methyluridine-3'-phosphorothioate
  modified_base 2: mod_base = OTHER; note = 2'-deoxy-2'-fluorouridine-3'-phosphorothioate
  modified_base 3: mod_base = OTHER; note = 2'-O-methyladenosine-3'-phosphate
  modified_base 4: mod_base = OTHER; note = 2'-O-methyluridine-3'-phosphate
  modified_base 5: mod_base = OTHER; note = 2'-O-methyladenosine-3'-phosphate
  modified_base 6: mod_base = OTHER; note = 2'-deoxy-2'-fluoroguanosine-3'-phosphate
  modified_base 7: mod_base = OTHER; note = 2'-O-methyladenosine-3'-phosphate
  modified_base 8: mod_base = OTHER; note = 2'-O-methylguanosine-3'-phosphate
  modified_base 9: mod_base = OTHER; note (2S,4R)-N-(2-(cytosin-1-yl)-1-oxoethyl)-2-hydroxymethyl-4-h ydroxypyrrolidine 4-phosphate
  modified_base 10: mod_base = OTHER; note = 2'-O-methyladenosine-3'-phosphate
  modified_base 11: mod_base = OTHER; note = 2'-O-methyladenosine-3'-phosphate
  modified_base 12: mod_base = OTHER; note = 2'-O-methylguanosine-3'-phosphate
  modified_base 13: mod_base = OTHER; note = 2'-O-methyladenosine-3'-phosphate
  modified_base 14: mod_base = OTHER; note = 2'-deoxy-2'-fluoroadenosine-3'-phosphate
  modified_base 15: mod_base = OTHER; note = 2'-O-methylcytidine-3'-phosphate
  modified_base 16: mod_base = OTHER; note = 2'-deoxy-2'-fluoroadenosine-3'-phosphate
  modified_base 17: mod_base = OTHER; note = 2'-O-methylcytidine-3'-phosphate
  modified_base 18: mod_base = OTHER; note = 2'-O-methyluridine-3'-phosphate
  modified_base 19: mod_base = OTHER; note = 2'-O-methylguanosine-3'-phosphate
  modified_base 20: mod_base = OTHER; note = 2'-O-methyluridine-3'-phosphate
  modified_base 21: mod_base = OTHER; note = 2'-O-methyluridine-3'-phosphorothioate
  modified_base 22: mod_base = OTHER; note = 2'-O-methyluridine-3'-phosphorothioate
  modified_base 23: mod_base = OTHER; note = 2'-O-methyluridine
ttatagagcaagaacactgtttt

SEQ ID NO: 278 - RNA, 23 nt, synthetic construct
  source 1..23: mol_type = other RNA
  modified_base 1: mod_base = OTHER; note = 2'-O-methyluridine-3'-phosphorothioate
  modified_base 2: mod_base = OTHER; note = 2'-deoxy-2'-fluorouridine-3'-phosphorothioate
  modified_base 3: mod_base = OTHER; note = 2'-O-methyladenosine-3'-phosphate
  modified_base 4: mod_base = OTHER; note = 2'-O-methyluridine-3'-phosphate
  modified_base 5: mod_base = OTHER; note = 2'-O-methyladenosine-3'-phosphate
  modified_base 6: mod_base = OTHER; note = 2'-deoxy-2'-fluoroguanosine-3'-phosphate
  modified_base 7: mod_base = OTHER; note = 2'-O-methyladenosine-3'-phosphate
  modified_base 8: mod_base = OTHER; note = 2'-O-methylguanosine-3'-phosphate
  modified_base 9: mod_base = OTHER; note (2S,4R)-N-acetyl-2-hydroxymethyl-4-hydroxypyrrolidine 4-phosphate
  modified_base 10: mod_base = OTHER; note = 2'-O-methyladenosine-3'-phosphate
  modified_base 11: mod_base = OTHER; note = 2'-O-methyladenosine-3'-phosphate
  modified_base 12: mod_base = OTHER; note = 2'-O-methylguanosine-3'-phosphate
  modified_base 13: mod_base = OTHER; note = 2'-O-methyladenosine-3'-phosphate
  modified_base 14: mod_base = OTHER; note = 2'-deoxy-2'-fluoroadenosine-3'-phosphate
  modified_base 15: mod_base = OTHER; note = 2'-O-methylcytidine-3'-phosphate
  modified_base 16: mod_base = OTHER; note = 2'-deoxy-2'-fluoroadenosine-3'-phosphate
  modified_base 17: mod_base = OTHER; note = 2'-O-methylcytidine-3'-phosphate
  modified_base 18: mod_base = OTHER; note = 2'-O-methyluridine-3'-phosphate
  modified_base 19: mod_base = OTHER; note = 2'-O-methylguanosine-3'-phosphate
  modified_base 20: mod_base = OTHER; note = 2'-O-methyluridine-3'-phosphate
  modified_base 21: mod_base = OTHER; note = 2'-O-methyluridine-3'-phosphorothioate
  modified_base 22: mod_base = OTHER; note = 2'-O-methyluridine-3'-phosphorothioate
  modified_base 23: mod_base = OTHER; note = 2'-O-methyluridine
ttatagagnaagaacactgtttt

SEQ ID NO: 279 - RNA, 23 nt, synthetic construct
  source 1..23: mol_type = other RNA
  modified_base 1: mod_base = OTHER; note = 2'-O-methyluridine-3'-phosphorothioate
  modified_base 2: mod_base = OTHER; note = 2'-deoxy-2'-fluorouridine-3'-phosphorothioate
  modified_base 3: mod_base = OTHER; note (2S,4R)-N-(2-(guanin-9-yl)-1-oxoethyl)-2-hydroxymethyl-4-hy droxypyrrolidine 4-phosphate
  modified_base 4: mod_base = OTHER; note = 2'-O-methyluridine-3'-phosphate
  modified_base 5: mod_base = OTHER; note = 2'-O-methylcytidine-3'-phosphate
  modified_base 6: mod_base = OTHER; note = 2'-deoxy-2'-fluoroguanosine-3'-phosphate
  modified_base 7: mod_base = OTHER; note = 2'-O-methyladenosine-3'-phosphate
  modified_base 8: mod_base = OTHER; note = 2'-deoxy-2'-fluorouridine-3'-phosphate
  modified_base 9: mod_base = OTHER; note = 2'-deoxy-2'-fluoroguanosine-3'-phosphate
  modified_base 10: mod_base = OTHER; note = 2'-O-methyladenosine-3'-phosphate
  modified_base 11: mod_base = OTHER; note = 2'-O-methylcytidine-3'-phosphate
  modified_base 12: mod_base = OTHER; note = 2'-O-methyluridine-3'-phosphate
  modified_base 13: mod_base = OTHER; note = 2'-O-methyluridine-3'-phosphate
  modified_base 14: mod_base = OTHER; note = 2'-deoxy-2'-fluorouridine-3'-phosphate
  modified_base 15: mod_base = OTHER; note = 2'-O-methylcytidine-3'-phosphate
  modified_base 16: mod_base = OTHER; note = 2'-deoxy-2'-fluoroadenosine-3'-phosphate
  modified_base 17: mod_base = OTHER; note = 2'-O-methylcytidine-3'-phosphate
  modified_base 18: mod_base = OTHER; note = 2'-O-methyladenosine-3'-phosphate
  modified_base 19: mod_base = OTHER; note = 2'-O-methyluridine-3'-phosphate
  modified_base 20: mod_base = OTHER; note = 2'-O-methyluridine-3'-phosphate
  modified_base 21: mod_base = OTHER; note = 2'-O-methylcytidine-3'-phosphorothioate
  modified_base 22: mod_base = OTHER; note = 2'-O-methyluridine-3'-phosphorothioate
  modified_base 23: mod_base = OTHER; note = 2'-O-methylguanosine
ttgtcgatgactttcacattctg

SEQ ID NO: 280 - RNA, 23 nt, synthetic construct
  source 1..23: mol_type = other RNA
  modified_base 1: mod_base = OTHER; note = 2'-O-methyluridine-3'-phosphorothioate
  modified_base 2: mod_base = OTHER; note = 2'-deoxy-2'-fluorouridine-3'-phosphorothioate
  modified_base 3: mod_base = OTHER; note (2S,4R)-N-acetyl-2-hydroxymethyl-4-hydroxypyrrolidine 4-phosphate
  modified_base 4: mod_base = OTHER; note = 2'-O-methyluridine-3'-phosphate
  modified_base 5: mod_base = OTHER; note = 2'-O-methylcytidine-3'-phosphate
  modified_base 6: mod_base = OTHER; note = 2'-deoxy-2'-fluoroguanosine-3'-phosphate
  modified_base 7: mod_base = OTHER; note = 2'-O-methyladenosine-3'-phosphate
  modified_base 8: mod_base = OTHER; note = 2'-deoxy-2'-fluorouridine-3'-phosphate
  modified_base 9: mod_base = OTHER; note = 2'-deoxy-2'-fluoroguanosine-3'-phosphate
  modified_base 10: mod_base = OTHER; note = 2'-O-methyladenosine-3'-phosphate
  modified_base 11: mod_base = OTHER; note = 2'-O-methylcytidine-3'-phosphate
  modified_base 12: mod_base = OTHER; note = 2'-O-methyluridine-3'-phosphate
  modified_base 13: mod_base = OTHER; note = 2'-O-methyluridine-3'-phosphate
  modified_base 14: mod_base = OTHER; note = 2'-deoxy-2'-fluorouridine-3'-phosphate
  modified_base 15: mod_base = OTHER; note = 2'-O-methylcytidine-3'-phosphate
  modified_base 16: mod_base = OTHER; note = 2'-deoxy-2'-fluoroadenosine-3'-phosphate
  modified_base 17: mod_base = OTHER; note = 2'-O-methylcytidine-3'-phosphate
  modified_base 18: mod_base = OTHER; note = 2'-O-methyladenosine-3'-phosphate
  modified_base 19: mod_base = OTHER; note = 2'-O-methyluridine-3'-phosphate
  modified_base 20: mod_base = OTHER; note = 2'-O-methyluridine-3'-phosphate
  modified_base 21: mod_base = OTHER; note = 2'-O-methylcytidine-3'-phosphorothioate
  modified_base 22: mod_base = OTHER; note = 2'-O-methyluridine-3'-phosphorothioate
  modified_base 23: mod_base = OTHER; note = 2'-O-methylguanosine
ttntcgatgactttcacattctg

SEQ ID NO: 281 - RNA, 23 nt, synthetic construct
  source 1..23: mol_type = other RNA
  modified_base 1: mod_base = OTHER; note = 2'-O-methyluridine-3'-phosphorothioate
  modified_base 2: mod_base = OTHER; note = 2'-deoxy-2'-fluorouridine-3'-phosphorothioate
  modified_base 3: mod_base = OTHER; note = 2'-O-methylguanosine-3'-phosphate
  modified_base 4: mod_base = OTHER; note (2S,4R)-N-(2-(thymin-1-yl)-1-oxoethyl)-2-hydroxymethyl-4-hy droxypyrrolidine 4-phosphate
  modified_base 5: mod_base = OTHER; note = 2'-O-methylcytidine-3'-phosphate
  modified_base 6: mod_base = OTHER; note = 2'-deoxy-2'-fluoroguanosine-3'-phosphate
  modified_base 7: mod_base = OTHER; note = 2'-O-methyladenosine-3'-phosphate
  modified_base 8: mod_base = OTHER; note = 2'-deoxy-2'-fluorouridine-3'-phosphate
  modified_base 9: mod_base = OTHER; note = 2'-deoxy-2'-fluoroguanosine-3'-phosphate
  modified_base 10: mod_base = OTHER; note = 2'-O-methyladenosine-3'-phosphate
  modified_base 11: mod_base = OTHER; note = 2'-O-methylcytidine-3'-phosphate
  modified_base 12: mod_base = OTHER; note = 2'-O-methyluridine-3'-phosphate
  modified_base 13: mod_base = OTHER; note = 2'-O-methyluridine-3'-phosphate
  modified_base 14: mod_base = OTHER; note = 2'-deoxy-2'-fluorouridine-3'-phosphate
  modified_base 15: mod_base = OTHER; note = 2'-O-methylcytidine-3'-phosphate
  modified_base 16: mod_base = OTHER; note = 2'-deoxy-2'-fluoroadenosine-3'-phosphate
  modified_base 17: mod_base = OTHER; note = 2'-O-methylcytidine-3'-phosphate
  modified_base 18: mod_base = OTHER; note = 2'-O-methyladenosine-3'-phosphate
  modified_base 19: mod_base = OTHER; note = 2'-O-methyluridine-3'-phosphate
  modified_base 20: mod_base = OTHER; note = 2'-O-methyluridine-3'-phosphate
  modified_base 21: mod_base = OTHER; note = 2'-O-methylcytidine-3'-phosphorothioate
  modified_base 22: mod_base = OTHER; note = 2'-O-methyluridine-3'-phosphorothioate
  modified_base 23: mod_base = OTHER; note = 2'-O-methylguanosine
ttgtcgatgactttcacattctg

SEQ ID NO: 282 - RNA, 23 nt, synthetic construct
  source 1..23: mol_type = other RNA
  modified_base 1: mod_base = OTHER; note = 2'-O-methyluridine-3'-phosphorothioate
  modified_base 2: mod_base = OTHER; note = 2'-deoxy-2'-fluorouridine-3'-phosphorothioate
  modified_base 3: mod_base = OTHER; note = 2'-O-methylguanosine-3'-phosphate
  modified_base 4: mod_base = OTHER; note (2S,4R)-N-acetyl-2-hydroxymethyl-4-hydroxypyrrolidine 4-phosphate
  modified_base 5: mod_base = OTHER; note = 2'-O-methylcytidine-3'-phosphate
  modified_base 6: mod_base = OTHER; note = 2'-deoxy-2'-fluoroguanosine-3'-phosphate
  modified_base 7: mod_base = OTHER; note = 2'-O-methyladenosine-3'-phosphate
  modified_base 8: mod_base = OTHER; note = 2'-deoxy-2'-fluorouridine-3'-phosphate
  modified_base 9: mod_base = OTHER; note = 2'-deoxy-2'-fluoroguanosine-3'-phosphate
  modified_base 10: mod_base = OTHER; note = 2'-O-methyladenosine-3'-phosphate
  modified_base 11: mod_base = OTHER; note = 2'-O-methylcytidine-3'-phosphate
  modified_base 12: mod_base = OTHER; note = 2'-O-methyluridine-3'-phosphate
  modified_base 13: mod_base = OTHER; note = 2'-O-methyluridine-3'-phosphate
  modified_base 14: mod_base = OTHER; note = 2'-deoxy-2'-fluorouridine-3'-phosphate
  modified_base 15: mod_base = OTHER; note = 2'-O-methylcytidine-3'-phosphate
  modified_base 16: mod_base = OTHER; note = 2'-deoxy-2'-fluoroadenosine-3'-phosphate
  modified_base 17: mod_base = OTHER; note = 2'-O-methylcytidine-3'-phosphate
  modified_base 18: mod_base = OTHER; note = 2'-O-methyladenosine-3'-phosphate
  modified_base 19: mod_base = OTHER; note = 2'-O-methyluridine-3'-phosphate
  modified_base 20: mod_base = OTHER; note = 2'-O-methyluridine-3'-phosphate
  modified_base 21: mod_base = OTHER; note = 2'-O-methylcytidine-3'-phosphorothioate
  modified_base 22: mod_base = OTHER; note = 2'-O-methyluridine-3'-phosphorothioate
  modified_base 23: mod_base = OTHER; note = 2'-O-methylguanosine
ttgncgatgactttcacattctg

SEQ ID NO: 283 - RNA, 23 nt, synthetic construct
  source 1..23: mol_type = other RNA
  modified_base 1: mod_base = OTHER; note = 2'-O-methyluridine-3'-phosphorothioate
  modified_base 2: mod_base = OTHER; note = 2'-deoxy-2'-fluorouridine-3'-phosphorothioate
  modified_base 3: mod_base = OTHER; note = 2'-O-methylguanosine-3'-phosphate
  modified_base 4: mod_base = OTHER; note = 2'-O-methyluridine-3'-phosphate
  modified_base 5: mod_base = OTHER; note (2S,4R)-N-(2-(cytosin-1-yl)-1-oxoethyl)-2-hydroxymethyl-4-h ydroxypyrrolidine 4-phosphate
  modified_base 6: mod_base = OTHER; note = 2'-deoxy-2'-fluoroguanosine-3'-phosphate
  modified_base 7: mod_base = OTHER; note = 2'-O-methyladenosine-3'-phosphate
  modified_base 8: mod_base = OTHER; note = 2'-deoxy-2'-fluorouridine-3'-phosphate
  modified_base 9: mod_base = OTHER; note = 2'-deoxy-2'-fluoroguanosine-3'-phosphate
  modified_base 10: mod_base = OTHER; note = 2'-O-methyladenosine-3'-phosphate
  modified_base 11: mod_base = OTHER; note = 2'-O-methylcytidine-3'-phosphate
  modified_base 12: mod_base = OTHER; note = 2'-O-methyluridine-3'-phosphate
  modified_base 13: mod_base = OTHER; note = 2'-O-methyluridine-3'-phosphate
  modified_base 14: mod_base = OTHER; note = 2'-deoxy-2'-fluorouridine-3'-phosphate
  modified_base 15: mod_base = OTHER; note = 2'-O-methylcytidine-3'-phosphate
  modified_base 16: mod_base = OTHER; note = 2'-deoxy-2'-fluoroadenosine-3'-phosphate
  modified_base 17: mod_base = OTHER; note = 2'-O-methylcytidine-3'-phosphate
  modified_base 18: mod_base = OTHER; note = 2'-O-methyladenosine-3'-phosphate
  modified_base 19: mod_base = OTHER; note = 2'-O-methyluridine-3'-phosphate
  modified_base 20: mod_base = OTHER; note = 2'-O-methyluridine-3'-phosphate
  modified_base 21: mod_base = OTHER; note = 2'-O-methylcytidine-3'-phosphorothioate
  modified_base 22: mod_base = OTHER; note = 2'-O-methyluridine-3'-phosphorothioate
  modified_base 23: mod_base = OTHER; note = 2'-O-methylguanosine
ttgtcgatgactttcacattctg

SEQ ID NO: 284 - RNA, 23 nt, synthetic construct
  source 1..23: mol_type = other RNA
  modified_base 1: mod_base = OTHER; note = 2'-O-methyluridine-3'-phosphorothioate
  modified_base 2: mod_base = OTHER; note = 2'-deoxy-2'-fluorouridine-3'-phosphorothioate
  modified_base 3: mod_base = OTHER; note = 2'-O-methylguanosine-3'-phosphate
  modified_base 4: mod_base = OTHER; note = 2'-O-methyluridine-3'-phosphate
  modified_base 5: mod_base = OTHER; note = 2'-O-methylcytidine-3'-phosphate
  modified_base 6: mod_base = OTHER; note (2S,4R)-N-(2-(guanin-9-yl)-1-oxoethyl)-2-hydroxymethyl-4-hy droxypyrrolidine 4-phosphate
  modified_base 7: mod_base = OTHER; note = 2'-O-methyladenosine-3'-phosphate
  modified_base 8: mod_base = OTHER; note = 2'-deoxy-2'-fluorouridine-3'-phosphate
  modified_base 9: mod_base = OTHER; note = 2'-deoxy-2'-fluoroguanosine-3'-phosphate
  modified_base 10: mod_base = OTHER; note = 2'-O-methyladenosine-3'-phosphate
  modified_base 11: mod_base = OTHER; note = 2'-O-methylcytidine-3'-phosphate
  modified_base 12: mod_base = OTHER; note = 2'-O-methyluridine-3'-phosphate
  modified_base 13: mod_base = OTHER; note = 2'-O-methyluridine-3'-phosphate
  modified_base 14: mod_base = OTHER; note = 2'-deoxy-2'-fluorouridine-3'-phosphate
  modified_base 15: mod_base = OTHER; note = 2'-O-methylcytidine-3'-phosphate
  modified_base 16: mod_base = OTHER; note = 2'-deoxy-2'-fluoroadenosine-3'-phosphate
  modified_base 17: mod_base = OTHER; note = 2'-O-methylcytidine-3'-phosphate
  modified_base 18: mod_base = OTHER; note = 2'-O-methyladenosine-3'-phosphate
  modified_base 19: mod_base = OTHER; note = 2'-O-methyluridine-3'-phosphate
  modified_base 20: mod_base = OTHER; note = 2'-O-methyluridine-3'-phosphate
  modified_base 21: mod_base = OTHER; note = 2'-O-methylcytidine-3'-phosphorothioate
  modified_base 22: mod_base = OTHER; note = 2'-O-methyluridine-3'-phosphorothioate
  modified_base 23: mod_base = OTHER; note = 2'-O-methylguanosine
ttgtcgatgactttcacattctg

SEQ ID NO: 285 - RNA, 23 nt, synthetic construct
  source 1..23: mol_type = other RNA
  modified_base 1: mod_base = OTHER; note = 2'-O-methyluridine-3'-phosphorothioate
  modified_base 2: mod_base = OTHER; note = 2'-deoxy-2'-fluorouridine-3'-phosphorothioate
  modified_base 3: mod_base = OTHER; note = 2'-O-methylguanosine-3'-phosphate
  modified_base 4: mod_base = OTHER; note = 2'-O-methyluridine-3'-phosphate
  modified_base 5: mod_base = OTHER; note = 2'-O-methylcytidine-3'-phosphate
  modified_base 6: mod_base = OTHER; note = 2'-deoxy-2'-fluoroguanosine-3'-phosphate
  modified_base 7: mod_base = OTHER; note (2S,4R)-N-(2-(adenin-9-yl)-1-oxoethyl)-2-hydroxymethyl-4-hy droxypyrrolidine 4-phosphate
  modified_base 8: mod_base = OTHER; note = 2'-deoxy-2'-fluorouridine-3'-phosphate
  modified_base 9: mod_base = OTHER; note = 2'-deoxy-2'-fluoroguanosine-3'-phosphate
  modified_base 10: mod_base = OTHER; note = 2'-O-methyladenosine-3'-phosphate
  modified_base 11: mod_base = OTHER; note = 2'-O-methylcytidine-3'-phosphate
  modified_base 12: mod_base = OTHER; note = 2'-O-methyluridine-3'-phosphate
  modified_base 13: mod_base = OTHER; note = 2'-O-methyluridine-3'-phosphate
  modified_base 14: mod_base = OTHER; note = 2'-deoxy-2'-fluorouridine-3'-phosphate
  modified_base 15: mod_base = OTHER; note = 2'-O-methylcytidine-3'-phosphate
  modified_base 16: mod_base = OTHER; note = 2'-deoxy-2'-fluoroadenosine-3'-phosphate
  modified_base 17: mod_base = OTHER; note = 2'-O-methylcytidine-3'-phosphate
  modified_base 18: mod_base = OTHER; note = 2'-O-methyladenosine-3'-phosphate
  modified_base 19: mod_base = OTHER; note = 2'-O-methyluridine-3'-phosphate
  modified_base 20: mod_base = OTHER; note = 2'-O-methyluridine-3'-phosphate
  modified_base 21: mod_base = OTHER; note = 2'-O-methylcytidine-3'-phosphorothioate
  modified_base 22: mod_base = OTHER; note = 2'-O-methyluridine-3'-phosphorothioate
  modified_base 23: mod_base = OTHER; note = 2'-O-methylguanosine
ttgtcgatgactttcacattctg

SEQ ID NO: 286 - RNA, 23 nt, synthetic construct
  source 1..23: mol_type = other RNA
  modified_base 1: mod_base = OTHER; note = 2'-O-methyluridine-3'-phosphorothioate
  modified_base 2: mod_base = OTHER; note = 2'-deoxy-2'-fluorouridine-3'-phosphorothioate
  modified_base 3: mod_base = OTHER; note = 2'-O-methylguanosine-3'-phosphate
  modified_base 4: mod_base = OTHER; note = 2'-O-methyluridine-3'-phosphate
  modified_base 5: mod_base = OTHER; note = 2'-O-methylcytidine-3'-phosphate
  modified_base 6: mod_base = OTHER; note = 2'-deoxy-2'-fluoroguanosine-3'-phosphate
  modified_base 7: mod_base = OTHER; note = 2'-O-methyladenosine-3'-phosphate
  modified_base 8: mod_base = OTHER; note (2S,4R)-N-(2-(thymin-1-yl)-1-oxoethyl)-2-hydroxymethyl-4-hy droxypyrrolidine 4-phosphate
  modified_base 9: mod_base = OTHER; note = 2'-deoxy-2'-fluoroguanosine-3'-phosphate
  modified_base 10: mod_base = OTHER; note = 2'-O-methyladenosine-3'-phosphate
  modified_base 11: mod_base = OTHER; note = 2'-O-methylcytidine-3'-phosphate
  modified_base 12: mod_base = OTHER; note = 2'-O-methyluridine-3'-phosphate
  modified_base 13: mod_base = OTHER; note = 2'-O-methyluridine-3'-phosphate
  modified_base 14: mod_base = OTHER; note = 2'-deoxy-2'-fluorouridine-3'-phosphate
  modified_base 15: mod_base = OTHER; note = 2'-O-methylcytidine-3'-phosphate
  modified_base 16: mod_base = OTHER; note = 2'-deoxy-2'-fluoroadenosine-3'-phosphate
  modified_base 17: mod_base = OTHER; note = 2'-O-methylcytidine-3'-phosphate
  modified_base 18: mod_base = OTHER; note = 2'-O-methyladenosine-3'-phosphate
  modified_base 19: mod_base = OTHER; note = 2'-O-methyluridine-3'-phosphate
  modified_base 20: mod_base = OTHER; note = 2'-O-methyluridine-3'-phosphate
  modified_base 21: mod_base = OTHER; note = 2'-O-methylcytidine-3'-phosphorothioate
  modified_base 22: mod_base = OTHER; note = 2'-O-methyluridine-3'-phosphorothioate
  modified_base 23: mod_base = OTHER; note = 2'-O-methylguanosine
ttgtcgatgactttcacattctg

SEQ ID NO: 287 - RNA, 23 nt, synthetic construct
  source 1..23: mol_type = other RNA
  modified_base 1: mod_base = OTHER; note = 2'-O-methyluridine-3'-phosphorothioate
  modified_base 2: mod_base = OTHER; note = 2'-deoxy-2'-fluorouridine-3'-phosphorothioate
  modified_base 3: mod_base = OTHER; note = 2'-O-methylguanosine-3'-phosphate
  modified_base 4: mod_base = OTHER; note = 2'-O-methyluridine-3'-phosphate
  modified_base 5: mod_base = OTHER; note = 2'-O-methylcytidine-3'-phosphate
  modified_base 6: mod_base = OTHER; note = 2'-deoxy-2'-fluoroguanosine-3'-phosphate
  modified_base 7: mod_base = OTHER; note = 2'-O-methyladenosine-3'-phosphate
  modified_base 8: mod_base = OTHER; note = 2'-deoxy-2'-fluorouridine-3'-phosphate
  modified_base 9: mod_base = OTHER; note (2S,4R)-N-(2-(guanin-9-yl)-1-oxoethyl)-2-hydroxymethyl-4-hy droxypyrrolidine 4-phosphate
  modified_base 10: mod_base = OTHER; note = 2'-O-methyladenosine-3'-phosphate
  modified_base 11: mod_base = OTHER; note = 2'-O-methylcytidine-3'-phosphate
  modified_base 12: mod_base = OTHER; note = 2'-O-methyluridine-3'-phosphate
  modified_base 13: mod_base = OTHER; note = 2'-O-methyluridine-3'-phosphate
  modified_base 14: mod_base = OTHER; note = 2'-deoxy-2'-fluorouridine-3'-phosphate
  modified_base 15: mod_base = OTHER; note = 2'-O-methylcytidine-3'-phosphate
  modified_base 16: mod_base = OTHER; note = 2'-deoxy-2'-fluoroadenosine-3'-phosphate
  modified_base 17: mod_base = OTHER; note = 2'-O-methylcytidine-3'-phosphate
  modified_base 18: mod_base = OTHER; note = 2'-O-methyladenosine-3'-phosphate
  modified_base 19: mod_base = OTHER; note = 2'-O-methyluridine-3'-phosphate
  modified_base 20: mod_base = OTHER; note = 2'-O-methyluridine-3'-phosphate
  modified_base 21: mod_base = OTHER; note = 2'-O-methylcytidine-3'-phosphorothioate
  modified_base 22: mod_base = OTHER; note = 2'-O-methyluridine-3'-phosphorothioate
  modified_base 23: mod_base = OTHER; note = 2'-O-methylguanosine
ttgtcgatgactttcacattctg

SEQ ID NO: 288 - RNA, 23 nt, synthetic construct
  source 1..23: mol_type = other RNA
  modified_base 1: mod_base = OTHER; note = 2'-O-methyluridine-3'-phosphorothioate
  modified_base 2: mod_base = OTHER; note = 2'-deoxy-2'-fluorouridine-3'-phosphorothioate
  modified_base 3: mod_base = OTHER; note = 2'-O-methylguanosine-3'-phosphate
  modified_base 4: mod_base = OTHER; note = 2'-O-methyluridine-3'-phosphate
  modified_base 5: mod_base = OTHER; note = 2'-O-methylcytidine-3'-phosphate
  modified_base 6: mod_base = OTHER; note = 2'-deoxy-2'-fluoroguanosine-3'-phosphate
  modified_base 7: mod_base = OTHER; note = 2'-O-methyladenosine-3'-phosphate
  modified_base 8: mod_base = OTHER; note = 2'-deoxy-2'-fluorouridine-3'-phosphate
  modified_base 9: mod_base = OTHER; note (2S,4R)-N-acetyl-2-hydroxymethyl-4-hydroxypyrrolidine 4-phosphate
  modified_base 10: mod_base = OTHER; note = 2'-O-methyladenosine-3'-phosphate
  modified_base 11: mod_base = OTHER; note = 2'-O-methylcytidine-3'-phosphate
  modified_base 12: mod_base = OTHER; note = 2'-O-methyluridine-3'-phosphate
  modified_base 13: mod_base = OTHER; note = 2'-O-methyluridine-3'-phosphate
  modified_base 14: mod_base = OTHER; note = 2'-deoxy-2'-fluorouridine-3'-phosphate
  modified_base 15: mod_base = OTHER; note = 2'-O-methylcytidine-3'-phosphate
  modified_base 16: mod_base = OTHER; note = 2'-deoxy-2'-fluoroadenosine-3'-phosphate
  modified_base 17: mod_base = OTHER; note = 2'-O-methylcytidine-3'-phosphate
  modified_base 18: mod_base = OTHER; note = 2'-O-methyladenosine-3'-phosphate
  modified_base 19: mod_base = OTHER; note = 2'-O-methyluridine-3'-phosphate
  modified_base 20: mod_base = OTHER; note = 2'-O-methyluridine-3'-phosphate
  modified_base 21: mod_base = OTHER; note = 2'-O-methylcytidine-3'-phosphorothioate
  modified_base 22: mod_base = OTHER; note = 2'-O-methyluridine-3'-phosphorothioate
  modified_base 23: mod_base = OTHER; note = 2'-O-methylguanosine
ttgtcgatnactttcacattctg

SEQ ID NO: 289 - RNA, 12 nt, synthetic construct
  source 1..12: mol_type = other RNA
tacagtctatgt

SEQ ID NO: 290 - RNA, 12 nt, synthetic construct
  source 1..12: mol_type = other RNA
  modified_base 6: mod_base = OTHER; note 2-(1R-(uracil-1-yl)-2-hydroxyethoxy)-1,3-(2S,3S)-dihydroxyb utane 1-phosphate
tacagtctatgt

SEQ ID NO: 291 - RNA, 12 nt, synthetic construct
  source 1..12: mol_type = other RNA
  modified_base 6: mod_base = OTHER; note 2-(1R-(uracil-1-yl)-2S-hydroxypropoxy)-1,3-dihydroxybutane 1-phosphate
tacagtctatgt

SEQ ID NO: 292 - RNA, 12 nt, synthetic construct
  source 1..12: mol_type = other RNA
  modified_base 6: mod_base = OTHER; note 2-(1R-(uracil-1-yl)-2-hydroxyethoxy)-1,3-(2S,3R)-dihydroxyb utane 1-phosphate
tacagtctatgt

SEQ ID NO: 293 - RNA, 12 nt, synthetic construct
  source 1..12: mol_type = other RNA
  modified_base 6: mod_base = OTHER; note 2-(1R-(uracil-1-yl)-2R-hydroxypropoxy)-1,3-dihydroxybutane 1-phosphate
tacagtctatgt

SEQ ID NO: 294 - RNA, 12 nt, synthetic construct
  source 1..12: mol_type = other RNA
  modified_base 6: mod_base = OTHER; note 2-(1R-(uracil-1-yl)-2-hydroxyethoxy)-(2R,3S)-1,3-dihydroxyb utane 3-phosphate
tacagtctatgt

SEQ ID NO: 295 - RNA, 12 nt, synthetic construct
  source 1..12: mol_type = other RNA
  modified_base 6: mod_base = OTHER; note 2-(1R-(uracil-1-yl)-2-hydroxyethoxy)-(2R,3R)-1,3-dihydroxyb utane 3-phosphate
tacagtctatgt

SEQ ID NO: 296 - RNA, 12 nt, synthetic construct
  source 1..12: mol_type = other RNA
  modified_base 6: mod_base = OTHER; note 2-(1R-(uracil-1-yl)-2-hydroxyethoxy)-1,3-dihydroxy-2-methox ypropane 1-phosphate
tacagtctatgt

SEQ ID NO: 297 - RNA, 12 nt, synthetic construct
  source 1..12: mol_type = other RNA
  modified_base 6: mod_base = OTHER; note 2-(1S-(uracil-1-yl)-2-hydroxyethoxy)-(2S,3R)-1,3-dihydroxyb utane 3-phosphate
tacagtctatgt

SEQ ID NO: 298 - RNA, 12 nt, synthetic construct
  source 1..12: mol_type = other RNA
  modified_base 6: mod_base = OTHER; note 2-(1R-(uracil-1-yl)-2-hydroxyethoxy)-1,3-dihydroxypropane 3-phosphate
tacagtctatgt

SEQ ID NO: 299 - DNA, 12 bp, synthetic construct
  source 1..12: mol_type = other DNA
tacagtctatgt

SEQ ID NO: 300 - DNA, 12 bp, synthetic construct
  source 1..12: mol_type = other DNA
  modified_base 6: mod_base = OTHER; note 2-(1R-(uracil-1-yl)-2-hydroxyethoxy)-1,3-(2S,3S)-dihydroxyb utane 1-phosphate
  misc_feature 6: note = RNA
  misc_feature 1..5: note = DNA
tacagtctatgt

SEQ ID NO: 301 - DNA, 12 bp, synthetic construct
  source 1..12: mol_type = other DNA
  modified_base 6: mod_base = OTHER; note 2-(1R-(uracil-1-yl)-2S-hydroxypropoxy)-1,3-dihydroxybutane 1-phosphate
  misc_feature 6: note = RNA
  misc_feature 1..5: note = DNA
tacagtctatgt

SEQ ID NO: 302 - DNA, 12 bp, synthetic construct
  source 1..12: mol_type = other DNA
  modified_base 6: mod_base = OTHER; note 2-(1R-(uracil-1-yl)-2-hydroxyethoxy)-1,3-(2S,3R)-dihydroxyb utane 1-phosphate
  misc_feature 6: note = RNA
  misc_feature 1..5: note = DNA
tacagtctatgt

SEQ ID NO: 303 - DNA, 12 bp, synthetic construct
  source 1..12: mol_type = other DNA
  modified_base 6: mod_base = OTHER; note 2-(1R-(uracil-1-yl)-2R-hydroxypropoxy)-1,3-dihydroxybutane 1-phosphate
  misc_feature 6: note = RNA
  misc_feature 1..5: note = DNA
tacagtctatgt

SEQ ID NO: 304 - DNA, 12 bp, synthetic construct
  source 1..12: mol_type = other DNA
  modified_base 6: mod_base = OTHER; note 2-(1R-(uracil-1-yl)-2-hydroxyethoxy)-(2R,3S)-1,3-dihydroxyb utane 3-phosphate
  misc_feature 6: note = RNA
  misc_feature 1..5: note = DNA
tacagtctatgt

SEQ ID NO: 305 - DNA, 12 bp, synthetic construct
  source 1..12: mol_type = other DNA
  modified_base 6: mod_base = OTHER; note 2-(1R-(uracil-1-yl)-2-hydroxyethoxy)-(2R,3R)-1,3-dihydroxyb utane 3-phosphate
  misc_feature 6: note = RNA
  misc_feature 1..5: note = DNA
tacagtctatgt

SEQ ID NO: 306 - DNA, 12 bp, synthetic construct
  source 1..12: mol_type = other DNA
  modified_base 6: mod_base = OTHER; note 2-(1R-(uracil-1-yl)-2-hydroxyethoxy)-1,3-dihydroxy-2-methox ypropane 1-phosphate
  misc_feature 6: note = RNA
  misc_feature 1..5: note = DNA
tacagtctatgt

SEQ ID NO: 307 - DNA, 12 bp, synthetic construct
  source 1..12: mol_type = other DNA
  modified_base 6: mod_base = OTHER; note 2-(1S-(uracil-1-yl)-2-hydroxyethoxy)-(2S,3R)-1,3-dihydroxyb utane 3-phosphate
  misc_feature 6: note = RNA
  misc_feature 1..5: note = DNA
tacagtctatgt

SEQ ID NO: 308 - DNA, 12 bp, synthetic construct
  source 1..12: mol_type = other DNA
  modified_base 6: mod_base = OTHER; note 2-(1R-(uracil-1-yl)-2-hydroxyethoxy)-1,3-dihydroxypropane 3-phosphate
  misc_feature 6: note = RNA
  misc_feature 1..5: note = DNA
tacagtctatgt

SEQ ID NO: 309 - RNA, 12 nt, synthetic construct
  source 1..12: mol_type = other RNA
tacagtctatgt

SEQ ID NO: 310 - RNA, 12 nt, synthetic construct
  source 1..12: mol_type = other RNA
  modified_base 6: mod_base = OTHER; note 2-(1R-(uracil-1-yl)-2-hydroxyethoxy)-1,3-(2S,3S)-dihydroxyb utane 1-phosphate
tacagtctatgt

SEQ ID NO: 311 - RNA, 12 nt, synthetic construct
  source 1..12: mol_type = other RNA
  modified_base 6: mod_base = OTHER; note 2-(1R-(uracil-1-yl)-2S-hydroxypropoxy)-1,3-dihydroxybutane 1-phosphate
tacagtctatgt

SEQ ID NO: 312 - RNA, 12 nt, synthetic construct
  source 1..12: mol_type = other RNA
  modified_base 6: mod_base = OTHER; note 2-(1R-(uracil-1-yl)-2-hydroxyethoxy)-1,3-(2S,3R)-dihydroxyb utane 1-phosphate
tacagtctatgt

SEQ ID NO: 313 - RNA, 12 nt, synthetic construct
  source 1..12: mol_type = other RNA
  modified_base 6: mod_base = OTHER; note 2-(1R-(uracil-1-yl)-2R-hydroxypropoxy)-1,3-dihydroxybutane 1-phosphate
tacagtctatgt

SEQ ID NO: 314 - RNA, 12 nt, synthetic construct
  source 1..12: mol_type = other RNA
  modified_base 6: mod_base = OTHER; note 2-(1R-(uracil-1-yl)-2-hydroxyethoxy)-(2R,3S)-1,3-dihydroxyb utane 3-phosphate
tacagtctatgt

SEQ ID NO: 315 - RNA, 12 nt, synthetic construct
  source 1..12: mol_type = other RNA
  modified_base 6: mod_base = OTHER; note 2-(1R-(uracil-1-yl)-2-hydroxyethoxy)-(2R,3R)-1,3-dihydroxyb utane 3-phosphate
tacagtctatgt

SEQ ID NO: 316 - RNA, 12 nt, synthetic construct
  source 1..12: mol_type = other RNA
  modified_base 6: mod_base = OTHER; note 2-(1R-(uracil-1-yl)-2-hydroxyethoxy)-1,3-dihydroxy-2-methox ypropane 1-phosphate
tacagtctatgt

SEQ ID NO: 317 - RNA, 12 nt, synthetic construct
  source 1..12: mol_type = other RNA
  modified_base 6: mod_base = OTHER; note 2-(1S-(uracil-1-yl)-2-hydroxyethoxy)-(2S,3R)-1,3-dihydroxyb utane 3-phosphate
tacagtctatgt

SEQ ID NO: 318 - RNA, 12 nt, synthetic construct
  source 1..12: mol_type = other RNA
  modified_base 6: mod_base = OTHER; note 2-(1R-(uracil-1-yl)-2-hydroxyethoxy)-1,3-dihydroxypropane 3-phosphate
tacagtctatgt

SEQ ID NO: 319 - DNA, 12 bp, synthetic construct
  source 1..12: mol_type = other DNA
tacagtctatgt

SEQ ID NO: 320 - DNA, 12 bp, synthetic construct
  source 1..12: mol_type = other DNA
  modified_base 6: mod_base = OTHER; note 2-(1R-(uracil-1-yl)-2-hydroxyethoxy)-1,3-(2S,3S)-dihydroxyb utane 1-phosphate
  misc_feature 6: note = RNA
  misc_feature 1..5: note = DNA
tacagtctatgt

SEQ ID NO: 321 - DNA, 12 bp, synthetic construct
  source 1..12: mol_type = other DNA
  modified_base 6: mod_base = OTHER; note 2-(1R-(uracil-1-yl)-2S-hydroxypropoxy)-1,3-dihydroxybutane 1-phosphate
  misc_feature 6: note = RNA
  misc_feature 1..5: note = DNA
tacagtctatgt

SEQ ID NO: 322 - DNA, 12 bp, synthetic construct
  source 1..12: mol_type = other DNA
  modified_base 6: mod_base = OTHER; note 2-(1R-(uracil-1-yl)-2-hydroxyethoxy)-1,3-(2S,3R)-dihydroxyb utane 1-phosphate
  misc_feature 6: note = RNA
  misc_feature 1..5: note = DNA
tacagtctatgt

SEQ ID NO: 323 - DNA, 12 bp, synthetic construct
  source 1..12: mol_type = other DNA
  modified_base 6: mod_base = OTHER; note 2-(1R-(uracil-1-yl)-2R-hydroxypropoxy)-1,3-dihydroxybutane 1-phosphate
  misc_feature 6: note = RNA
  misc_feature 1..5: note = DNA
tacagtctatgt

SEQ ID NO: 324 - DNA, 12 bp, synthetic construct
  source 1..12: mol_type = other DNA
  modified_base 6: mod_base = OTHER; note 2-(1R-(uracil-1-yl)-2-hydroxyethoxy)-(2R,3S)-1,3-dihydroxyb utane 3-phosphate
  misc_feature 6: note = RNA
  misc_feature 1..5: note = DNA
tacagtctatgt

SEQ ID NO: 325 - DNA, 12 bp, synthetic construct
  source 1..12: mol_type = other DNA
  modified_base 6: mod_base = OTHER; note 2-(1R-(uracil-1-yl)-2-hydroxyethoxy)-(2R,3R)-1,3-dihydroxyb utane 3-phosphate
  misc_feature 6: note = RNA
  misc_feature 1..5: note = DNA
tacagtctatgt

SEQ ID NO: 326 - DNA, 12 bp, synthetic construct
  source 1..12: mol_type = other DNA
  modified_base 6: mod_base = OTHER; note 2-(1R-(uracil-1-yl)-2-hydroxyethoxy)-1,3-dihydroxy-2-methox ypropane 1-phosphate
  misc_feature 6: note = RNA
  misc_feature 1..5: note = DNA
tacagtctatgt

SEQ ID NO: 327 - DNA, 12 bp, synthetic construct
  source 1..12: mol_type = other DNA
  modified_base 6: mod_base = OTHER; note 2-(1S-(uracil-1-yl)-2-hydroxyethoxy)-(2S,3R)-1,3-dihydroxyb utane 3-phosphate
  misc_feature 6: note = RNA
  misc_feature 1..5: note = DNA
tacagtctatgt

SEQ ID NO: 328 - DNA, 12 bp, synthetic construct
  source 1..12: mol_type = other DNA
  modified_base 6: mod_base = OTHER; note 2-(1R-(uracil-1-yl)-2-hydroxyethoxy)-1,3-dihydroxypropane 3-phosphate
  misc_feature 6: note = RNA
  misc_feature 1..5: note = DNA
tacagtctatgt

SEQ ID NO: 329 - RNA, 12 nt, synthetic construct
  source 1..12: mol_type = other RNA
acatagactgta

SEQ ID NO: 330 - RNA, 12 nt, synthetic construct
  source 1..12: mol_type = other RNA
acatagactgta

SEQ ID NO: 331 - RNA, 12 nt, synthetic construct
  source 1..12: mol_type = other RNA
acatagactgta

SEQ ID NO: 332 - RNA, 12 nt, synthetic construct
  source 1..12: mol_type = other RNA
acatagactgta

SEQ ID NO: 333 - RNA, 12 nt, synthetic construct
  source 1..12: mol_type = other RNA
acatagactgta

SEQ ID NO: 334 - RNA, 12 nt, synthetic construct
  source 1..12: mol_type = other RNA
acatagactgta

SEQ ID NO: 335 - RNA, 12 nt, synthetic construct
  source 1..12: mol_type = other RNA
acatagactgta

SEQ ID NO: 336 - RNA, 12 nt, synthetic construct
  source 1..12: mol_type = other RNA
acatagactgta

SEQ ID NO: 337 - RNA, 12 nt, synthetic construct
  source 1..12: mol_type = other RNA
acatagactgta

SEQ ID NO: 338 - RNA, 12 nt, synthetic construct
  source 1..12: mol_type = other RNA
acatagactgta

SEQ ID NO: 339 - DNA, 12 bp, synthetic construct
  source 1..12: mol_type = other DNA
acatagactgta

SEQ ID NO: 340 - DNA, 12 bp, synthetic construct
  source 1..12: mol_type = other DNA
acatagactgta

SEQ ID NO: 341 - DNA, 12 bp, synthetic construct
  source 1..12: mol_type = other DNA
acatagactgta

SEQ ID NO: 342 - DNA, 12 bp, synthetic construct
  source 1..12: mol_type = other DNA
acatagactgta

SEQ ID NO: 343 - DNA, 12 bp, synthetic construct
  source 1..12: mol_type = other DNA
acatagactgta

SEQ ID NO: 344 - DNA, 12 bp, synthetic construct
  source 1..12: mol_type = other DNA
acatagactgta

SEQ ID NO: 345 - DNA, 12 bp, synthetic construct
  source 1..12: mol_type = other DNA
acatagactgta

SEQ ID NO: 346 - DNA, 12 bp, synthetic construct
  source 1..12: mol_type = other DNA
acatagactgta

SEQ ID NO: 347 - DNA, 12 bp, synthetic construct
  source 1..12: mol_type = other DNA
acatagactgta

SEQ ID NO: 348 - DNA, 12 bp, synthetic construct
  source 1..12: mol_type = other DNA
acatagactgta

SEQ ID NO: 349 - DNA, 12 bp, synthetic construct
  source 1..12: mol_type = other DNA
acatagactgta

SEQ ID NO: 350 - DNA, 12 bp, synthetic construct
  source 1..12: mol_type = other DNA
acatagactgta

SEQ ID NO: 351 - DNA, 12 bp, synthetic construct
  source 1..12: mol_type = other DNA
acatagactgta

SEQ ID NO: 352 - DNA, 12 bp, synthetic construct
  source 1..12: mol_type = other DNA
acatagactgta

SEQ ID NO: 353 - DNA, 12 bp, synthetic construct
  source 1..12: mol_type = other DNA
acatagactgta

SEQ ID NO: 354 - DNA, 12 bp, synthetic construct
  source 1..12: mol_type = other DNA
acatagactgta

SEQ ID NO: 355 - DNA, 12 bp, synthetic construct
  source 1..12: mol_type = other DNA
acatagactgta

SEQ ID NO: 356 - DNA, 12 bp, synthetic construct
  source 1..12: mol_type = other DNA
acatagactgta

SEQ ID NO: 357 - DNA, 12 bp, synthetic construct
  source 1..12: mol_type = other DNA
acatagactgta

SEQ ID NO: 358 - DNA, 12 bp, synthetic construct
  source 1..12: mol_type = other DNA
acatagactgta

SEQ ID NO: 359 - RNA, 12 nt, synthetic construct
  source 1..12: mol_type = other RNA
acatagactgta

SEQ ID NO: 360 - RNA, 12 nt, synthetic construct
  source 1..12: mol_type = other RNA
acatagactgta

SEQ ID NO: 361 - RNA, 12 nt, synthetic construct
  source 1..12: mol_type = other RNA
acatagactgta

SEQ ID NO: 362 - RNA, 12 nt, synthetic construct
  source 1..12: mol_type = other RNA
acatagactgta

SEQ ID NO: 363 - RNA, 12 nt, synthetic construct
  source 1..12: mol_type = other RNA
acatagactgta

SEQ ID NO: 364 - RNA, 12 nt, synthetic construct
  source 1..12: mol_type = other RNA
acatagactgta

SEQ ID NO: 365 - RNA, 12 nt, synthetic construct
  source 1..12: mol_type = other RNA
acatagactgta

SEQ ID NO: 366 - RNA, 12 nt, synthetic construct
  source 1..12: mol_type = other RNA
acatagactgta

SEQ ID NO: 367 - RNA, 12 nt, synthetic construct
  source 1..12: mol_type = other RNA
acatagactgta

SEQ ID NO: 368 - RNA, 12 nt, synthetic construct
  source 1..12: mol_type = other RNA
acatagactgta

SEQ ID NO: 369 - RNA, 21 nt, synthetic construct
  source 1..21: mol_type = other RNA
  modified_base 1: mod_base = OTHER; note = 2'-O-methyluridine-3'-phosphorothioate
  modified_base 2: mod_base = OTHER; note = 2'-O-methyluridine-3'-phosphorothioate
  modified_base 3: mod_base = OTHER; note = 2'-O-methylcytidine-3'-phosphate
  modified_base 4: mod_base = OTHER; note = 2'-O-methyluridine-3'-phosphate
  modified_base 5: mod_base = OTHER; note = 2'-O-methyluridine-3'-phosphate
  modified_base 6: mod_base = OTHER; note = 2'-O-methylguanosine-3'-phosphate
  modified_base 7: mod_base = OTHER; note = 2'-deoxy-2'-fluorocytidine-3'-phosphate
  modified_base 8: mod_base = OTHER; note = 2'-O-methyluridine-3'-phosphate
  modified_base 9: mod_base = OTHER; note = 2'-deoxy-2'-fluorocytidine-3'-phosphate
  modified_base 10: mod_base = OTHER; note = 2'-deoxy-2'-fluorouridine-3'-phosphate
  modified_base 11: mod_base = OTHER; note = 2'-deoxy-2'-fluoroadenosine-3'-phosphate
  modified_base 12: mod_base = OTHER; note = 2'-O-methyluridine-3'-phosphate
  modified_base 13: mod_base = OTHER; note = 2'-O-methyladenosine-3'-phosphate
  modified_base 14: mod_base = OTHER; note = 2'-O-methyladenosine-3'-phosphate
  modified_base 15: mod_base = OTHER; note = 2'-O-methyladenosine-3'-phosphate
  modified_base 16: mod_base = OTHER; note = 2'-O-methylcytidine-3'-phosphate
  modified_base 17: mod_base = OTHER; note = 2'-O-methylcytidine-3'-phosphate
  modified_base 18: mod_base = OTHER; note = 2'-O-methylguanosine-3'-phosphate
  modified_base 19: mod_base = OTHER; note = 2'-O-methyluridine-3'-phosphate
  modified_base 20: mod_base = OTHER; note = 2'-O-methylguanosine-3'-phosphate
  modified_base 21: mod_base = OTHER; note = 2'-O-methyluridine-3'-phosphate conjugated at the 3'-end to an L96 ligand
ttcttgctctataaaccgtgt

SEQ ID NO: 370 - RNA, 21 nt, synthetic construct
  source 1..21: mol_type = other RNA
  modified_base 1: mod_base = OTHER; note = 2'-O-methyluridine-3'-phosphorothioate
  modified_base 2: mod_base = OTHER; note = 2'-O-methyluridine-3'-phosphorothioate
  modified_base 3: mod_base = OTHER; note = 2'-O-methylcytidine-3'-phosphate
  modified_base 4: mod_base = OTHER; note = 2'-O-methyluridine-3'-phosphate
  modified_base 5: mod_base = OTHER; note = 2'-O-methyluridine-3'-phosphate
  modified_base 6: mod_base = OTHER; note = 2'-O-methylguanosine-3'-phosphate
  modified_base 7: mod_base = OTHER; note = 2'-deoxy-2'-fluorocytidine-3'-phosphate
  modified_base 8: mod_base = OTHER; note = 2'-O-methyluridine-3'-phosphate
  modified_base 9: mod_base = OTHER; note = 2'-deoxy-2'-fluorocytidine-3'-phosphate
  modified_base 10: mod_base = OTHER; note = 2'-deoxy-2'-fluorouridine-3'-phosphate
  modified_base 11: mod_base = OTHER; note = 2'-deoxy-2'-fluoroadenosine-3'-phosphate
  modified_base 12: mod_base = OTHER; note = 2'-O-methyluridine-3'-phosphate
  modified_base 13: mod_base = OTHER; note = 2'-O-methyladenosine-3'-phosphate
  modified_base 14: mod_base = OTHER; note = 2'-O-methyladenosine-3'-phosphate
  modified_base 15: mod_base = OTHER; note = 2'-O-methyladenosine-3'-phosphate
  modified_base 16: mod_base = OTHER; note = 2'-O-methylcytidine-3'-phosphate
  modified_base 17: mod_base = OTHER; note = 2'-O-methylcytidine-3'-phosphate
  modified_base 18: mod_base = OTHER; note = 2'-O-methylguanosine-3'-phosphate
  modified_base 19: mod_base = OTHER; note = 2'-O-methyluridine-3'-phosphate
  modified_base 20: mod_base = OTHER; note = 2'-O-methylguanosine-3'-phosphate
  modified_base 21: mod_base = OTHER; note = 2'-O-methyluridine-3'-phosphate conjugated at the 3'-end to an L96 ligand
ttcttgctctataaaccgtgt

SEQ ID NO: 371 - RNA, 21 nt, synthetic construct
  source 1..21: mol_type = other RNA
  modified_base 1: mod_base = OTHER; note = 2'-O-methyladenosine-3'-phosphorothioate
  modified_base 2: mod_base = OTHER; note = 2'-O-methylguanosine-3'-phosphorothioate
  modified_base 3: mod_base = OTHER; note = 2'-O-methyluridine-3'-phosphate
  modified_base 4: mod_base = OTHER; note = 2'-O-methylguanosine-3'-phosphate
  modified_base 5: mod_base = OTHER; note = 2'-O-methyluridine-3'-phosphate
  modified_base 6: mod_base = OTHER; note = 2'-O-methyluridine-3'-phosphate
  modified_base 7: mod_base = OTHER; note = 2'-deoxy-2'-fluorocytidine-3'-phosphate
  modified_base 8: mod_base = OTHER; note = 2'-O-methyluridine-3'-phosphate
  modified_base 9: mod_base = OTHER; note = 2'-deoxy-2'-fluorouridine-3'-phosphate
  modified_base 10: mod_base = OTHER; note = 2'-deoxy-2'-fluoroguanosine-3'-phosphate
  modified_base 11: mod_base = OTHER; note = 2'-deoxy-2'-fluorocytidine-3'-phosphate
  modified_base 12: mod_base = OTHER; note = 2'-O-methyluridine-3'-phosphate
  modified_base 13: mod_base = OTHER; note = 2'-O-methylcytidine-3'-phosphate
  modified_base 14: mod_base = OTHER; note = 2'-O-methyluridine-3'-phosphate
  modified_base 15: mod_base = OTHER; note = 2'-O-methyladenosine-3'-phosphate
  modified_base 16: mod_base = OTHER; note = 2'-O-methyluridine-3'-phosphate
  modified_base 17: mod_base = OTHER; note = 2'-O-methyladenosine-3'-phosphate
  modified_base 18: mod_base = OTHER; note = 2'-O-methyladenosine-3'-phosphate
  modified_base 19: mod_base = OTHER; note = 2'-O-methyladenosine-3'-phosphate
  modified_base 20: mod_base = OTHER; note = 2'-O-methylcytidine-3'-phosphate
  modified_base 21: mod_base = OTHER; note = 2'-O-methyladenosine-3'-phosphate conjugated at the 3'-end to an L96 ligand
agtgttcttgctctataaaca

SEQ ID NO: 372 - RNA, 21 nt, synthetic construct
  source 1..21: mol_type = other RNA
  modified_base 1: mod_base = OTHER; note = 2'-O-methyladenosine-3'-phosphorothioate
  modified_base 2: mod_base = OTHER; note = 2'-O-methylguanosine-3'-phosphorothioate
  modified_base 3: mod_base = OTHER; note = 2'-O-methyluridine-3'-phosphate
  modified_base 4: mod_base = OTHER; note = 2'-O-methylguanosine-3'-phosphate
  modified_base 5: mod_base = OTHER; note = 2'-O-methyluridine-3'-phosphate
  modified_base 6: mod_base = OTHER; note = 2'-O-methyluridine-3'-phosphate
  modified_base 7: mod_base = OTHER; note = 2'-deoxy-2'-fluorocytidine-3'-phosphate
  modified_base 8: mod_base = OTHER; note = 2'-O-methyluridine-3'-phosphate
  modified_base 9: mod_base = OTHER; note = 2'-deoxy-2'-fluorouridine-3'-phosphate
  modified_base 10: mod_base = OTHER; note = 2'-deoxy-2'-fluoroguanosine-3'-phosphate
  modified_base 11: mod_base = OTHER; note = 2'-deoxy-2'-fluorocytidine-3'-phosphate
  modified_base 12: mod_base = OTHER; note = 2'-O-methyluridine-3'-phosphate
  modified_base 13: mod_base = OTHER; note = 2'-O-methylcytidine-3'-phosphate
  modified_base 14: mod_base = OTHER; note = 2'-O-methyluridine-3'-phosphate
  modified_base 15: mod_base = OTHER; note = 2'-O-methyladenosine-3'-phosphate
  modified_base 16: mod_base = OTHER; note = 2'-O-methyluridine-3'-phosphate
  modified_base 17: mod_base = OTHER; note = 2'-O-methyladenosine-3'-phosphate
  modified_base 18: mod_base = OTHER; note = 2'-O-methyladenosine-3'-phosphate
  modified_base 19: mod_base = OTHER; note = 2'-O-methyladenosine-3'-phosphate
  modified_base 20: mod_base = OTHER; note = 2'-O-methylcytidine-3'-phosphate
  modified_base 21: mod_base = OTHER; note = 2'-O-methyladenosine-3'-phosphate conjugated at the 3'-end to an L96 ligand
agtgttcttgctctataaaca

SEQ ID NO: 373 - RNA, 21 nt, synthetic construct
  source 1..21: mol_type = other RNA
  modified_base 1: mod_base = OTHER; note = 2'-O-methyluridine-3'-phosphorothioate
  modified_base 2: mod_base = OTHER; note = 2'-O-methyluridine-3'-phosphorothioate
  modified_base 3: mod_base = OTHER; note = 2'-O-methylcytidine-3'-phosphate
  modified_base 4: mod_base = OTHER; note = 2'-O-methyluridine-3'-phosphate
  modified_base 5: mod_base = OTHER; note = 2'-O-methyluridine-3'-phosphate
  modified_base 6: mod_base = OTHER; note = 2'-O-methylguanosine-3'-phosphate
  modified_base 7: mod_base = OTHER; note = 2'-deoxy-2'-fluorocytidine-3'-phosphate
  modified_base 8: mod_base = OTHER; note = 2'-O-methyluridine-3'-phosphate
  modified_base 9: mod_base = OTHER; note = 2'-deoxy-2'-fluorocytidine-3'-phosphate
  modified_base 10: mod_base = OTHER; note = 2'-deoxy-2'-fluorouridine-3'-phosphate
  modified_base 11: mod_base = OTHER; note = 2'-deoxy-2'-fluoroadenosine-3'-phosphate
  modified_base 12: mod_base = OTHER; note = 2'-O-methyluridine-3'-phosphate
  modified_base 13: mod_base = OTHER; note = 2'-O-methyladenosine-3'-phosphate
  modified_base 14: mod_base = OTHER; note = 2'-O-methyladenosine-3'-phosphate
  modified_base 15: mod_base = OTHER; note = 2'-O-methyladenosine-3'-phosphate
  modified_base 16: mod_base = OTHER; note = 2'-O-methylcytidine-3'-phosphate
  modified_base 17: mod_base = OTHER; note = 2'-O-methylcytidine-3'-phosphate
  modified_base 18: mod_base = OTHER; note = 2'-O-methylguanosine-3'-phosphate
  modified_base 19: mod_base = OTHER; note = 2'-O-methyluridine-3'-phosphate
  modified_base 20: mod_base = OTHER; note = 2'-O-methylguanosine-3'-phosphate
  modified_base 21: mod_base = OTHER; note = 2'-O-methyluridine-3'-phosphate conjugated at the 3'-end to an L96 ligand
ttcttgctctataaaccgtgt

SEQ ID NO: 374 - RNA, 21 nt, synthetic construct
  source 1..21: mol_type = other RNA
  modified_base 1: mod_base = OTHER; note = 2'-O-methyladenosine-3'-phosphorothioate
  modified_base 2: mod_base = OTHER; note = 2'-O-methylguanosine-3'-phosphorothioate
  modified_base 3: mod_base = OTHER; note = 2'-O-methyluridine-3'-phosphate
  modified_base 4: mod_base = OTHER; note = 2'-O-methylguanosine-3'-phosphate
  modified_base 5: mod_base = OTHER; note = 2'-O-methyluridine-3'-phosphate
  modified_base 6: mod_base = OTHER; note = 2'-O-methyluridine-3'-phosphate
  modified_base 7: mod_base = OTHER; note = 2'-deoxy-2'-fluorocytidine-3'-phosphate
  modified_base 8: mod_base = OTHER; note = 2'-O-methyluridine-3'-phosphate
  modified_base 9: mod_base = OTHER; note = 2'-deoxy-2'-fluorouridine-3'-phosphate
  modified_base 10: mod_base = OTHER; note = 2'-deoxy-2'-fluoroguanosine-3'-phosphate
  modified_base 11: mod_base = OTHER; note = 2'-deoxy-2'-fluorocytidine-3'-phosphate
  modified_base 12: mod_base = OTHER; note = 2'-O-methyluridine-3'-phosphate
  modified_base 13: mod_base = OTHER; note = 2'-O-methylcytidine-3'-phosphate
  modified_base 14: mod_base = OTHER; note = 2'-O-methyluridine-3'-phosphate
  modified_base 15: mod_base = OTHER; note = 2'-O-methyladenosine-3'-phosphate
  modified_base 16: mod_base = OTHER; note = 2'-O-methyluridine-3'-phosphate
  modified_base 17: mod_base = OTHER; note = 2'-O-methyladenosine-3'-phosphate
  modified_base 18: mod_base = OTHER; note = 2'-O-methyladenosine-3'-phosphate
  modified_base 19: mod_base = OTHER; note = 2'-O-methyladenosine-3'-phosphate
  modified_base 20: mod_base = OTHER; note = 2'-O-methylcytidine-3'-phosphate
  modified_base 21: mod_base = OTHER; note = 2'-O-methyladenosine-3'-phosphate conjugated at the 3'-end to an L96 ligand
agtgttcttgctctataaaca

SEQ ID NO: 375 - RNA, 21 nt, synthetic construct
  source 1..21: mol_type = other RNA
  modified_base 1: mod_base = OTHER; note = 2'-O-methyladenosine-3'-phosphorothioate
  modified_base 2: mod_base = OTHER; note = 2'-O-methylguanosine-3'-phosphorothioate
  modified_base 3: mod_base = OTHER; note = 2'-O-methyluridine-3'-phosphate
  modified_base 4: mod_base = OTHER; note = 2'-O-methylguanosine-3'-phosphate
  modified_base 5: mod_base = OTHER; note = 2'-O-methyluridine-3'-phosphate
  modified_base 6: mod_base = OTHER; note = 2'-O-methyluridine-3'-phosphate
  modified_base 7: mod_base = OTHER; note = 2'-deoxy-2'-fluorocytidine-3'-phosphate
  modified_base 8: mod_base = OTHER; note = 2'-O-methyluridine-3'-phosphate
  modified_base 9: mod_base = OTHER; note = 2'-deoxy-2'-fluorouridine-3'-phosphate
  modified_base 10: mod_base = OTHER; note = 2'-deoxy-2'-fluoroguanosine-3'-phosphate
  modified_base 11: mod_base = OTHER; note = 2'-deoxy-2'-fluorocytidine-3'-phosphate
  modified_base 12: mod_base = OTHER; note = 2'-O-methyluridine-3'-phosphate
  modified_base 13: mod_base = OTHER; note = 2'-O-methylcytidine-3'-phosphate
  modified_base 14: mod_base = OTHER; note = 2'-O-methyluridine-3'-phosphate
  modified_base 15: mod_base = OTHER; note = 2'-O-methyladenosine-3'-phosphate
  modified_base 16: mod_base = OTHER; note = 2'-O-methyluridine-3'-phosphate
  modified_base 17: mod_base = OTHER; note = 2'-O-methyladenosine-3'-phosphate
  modified_base 18: mod_base = OTHER; note = 2'-O-methyladenosine-3'-phosphate
  modified_base 19: mod_base = OTHER; note = 2'-O-methyladenosine-3'-phosphate
  modified_base 20: mod_base = OTHER; note = 2'-O-methylcytidine-3'-phosphate
  modified_base 21: mod_base = OTHER; note = 2'-O-methyladenosine-3'-phosphate conjugated at the 3'-end to an L96 ligand
agtgttcttgctctataaaca

SEQ ID NO: 376 - RNA, 21 nt, synthetic construct
  source 1..21: mol_type = other RNA
  modified_base 1: mod_base = OTHER; note = 2'-O-methyluridine-3'-phosphorothioate
  modified_base 2: mod_base = OTHER; note = 2'-O-methyluridine-3'-phosphorothioate
  modified_base 3: mod_base = OTHER; note = 2'-O-methylcytidine-3'-phosphate
  modified_base 4: mod_base = OTHER; note = 2'-O-methyluridine-3'-phosphate
  modified_base 5: mod_base = OTHER; note = 2'-O-methyluridine-3'-phosphate
  modified_base 6: mod_base = OTHER; note = 2'-O-methylguanosine-3'-phosphate
  modified_base 7: mod_base = OTHER; note = 2'-deoxy-2'-fluorocytidine-3'-phosphate
  modified_base 8: mod_base = OTHER; note = 2'-O-methyluridine-3'-phosphate
  modified_base 9: mod_base = OTHER; note = 2'-deoxy-2'-fluorocytidine-3'-phosphate
  modified_base 10: mod_base = OTHER; note = 2'-deoxy-2'-fluorouridine-3'-phosphate
  modified_base 11: mod_base = OTHER; note = 2'-deoxy-2'-fluoroadenosine-3'-phosphate
  modified_base 12: mod_base = OTHER; note = 2'-O-methyluridine-3'-phosphate
  modified_base 13: mod_base = OTHER; note = 2'-O-methyladenosine-3'-phosphate
  modified_base 14: mod_base = OTHER; note = 2'-O-methyladenosine-3'-phosphate
  modified_base 15: mod_base = OTHER; note = 2'-O-methyladenosine-3'-phosphate
  modified_base 16: mod_base = OTHER; note = 2'-O-methylcytidine-3'-phosphate
  modified_base 17: mod_base = OTHER; note = 2'-O-methylcytidine-3'-phosphate
  modified_base 18: mod_base = OTHER; note = 2'-O-methylguanosine-3'-phosphate
  modified_base 19: mod_base = OTHER; note = 2'-O-methyluridine-3'-phosphate
  modified_base 20: mod_base = OTHER; note = 2'-O-methylguanosine-3'-phosphate
  modified_base 21: mod_base = OTHER; note = 2'-O-methyluridine-3'-phosphate conjugated at the 3'-end to an L96 ligand
ttcttgctctataaaccgtgt

SEQ ID NO: 377 - RNA, 21 nt, synthetic construct
  source 1..21: mol_type = other RNA
  modified_base 1: mod_base = OTHER; note = 2'-O-methyladenosine-3'-phosphorothioate
  modified_base 2: mod_base = OTHER; note = 2'-O-methylguanosine-3'-phosphorothioate
  modified_base 3: mod_base = OTHER; note = 2'-O-methyluridine-3'-phosphate
  modified_base 4: mod_base = OTHER; note = 2'-O-methylguanosine-3'-phosphate
  modified_base 5: mod_base = OTHER; note = 2'-O-methyluridine-3'-phosphate
  modified_base 6: mod_base = OTHER; note = 2'-O-methyluridine-3'-phosphate
  modified_base 7: mod_base = OTHER; note = 2'-deoxy-2'-fluorocytidine-3'-phosphate
  modified_base 8: mod_base = OTHER; note = 2'-O-methyluridine-3'-phosphate
  modified_base 9: mod_base = OTHER; note = 2'-deoxy-2'-fluorouridine-3'-phosphate
  modified_base 10: mod_base = OTHER; note = 2'-deoxy-2'-fluoroguanosine-3'-phosphate
  modified_base 11: mod_base = OTHER; note = 2'-deoxy-2'-fluorocytidine-3'-phosphate
  modified_base 12: mod_base = OTHER; note = 2'-O-methyluridine-3'-phosphate
  modified_base 13: mod_base = OTHER; note = 2'-O-methylcytidine-3'-phosphate
  modified_base 14: mod_base = OTHER; note = 2'-O-methyluridine-3'-phosphate
  modified_base 15: mod_base = OTHER; note = 2'-O-methyladenosine-3'-phosphate
  modified_base 16: mod_base = OTHER; note = 2'-O-methyluridine-3'-phosphate
  modified_base 17: mod_base = OTHER; note = 2'-O-methyladenosine-3'-phosphate
  modified_base 18: mod_base = OTHER; note = 2'-O-methyladenosine-3'-phosphate
  modified_base 19: mod_base = OTHER; note = 2'-O-methyladenosine-3'-phosphate
  modified_base 20: mod_base = OTHER; note = 2'-O-methylcytidine-3'-phosphate
  modified_base 21: mod_base = OTHER; note = 2'-O-methyladenosine-3'-phosphate conjugated at the 3'-end to an L96 ligand
agtgttcttgctctataaaca

SEQ ID NO: 378 - RNA, 21 nt, synthetic construct
  source 1..21: mol_type = other RNA
  modified_base 1: mod_base = OTHER; note = 2'-O-methyladenosine-3'-phosphorothioate
  modified_base 2: mod_base = OTHER; note = 2'-O-methylguanosine-3'-phosphorothioate
  modified_base 3: mod_base = OTHER; note = 2'-O-methyluridine-3'-phosphate
  modified_base 4: mod_base = OTHER; note = 2'-O-methylguanosine-3'-phosphate
  modified_base 5: mod_base = OTHER; note = 2'-O-methyluridine-3'-phosphate
  modified_base 6: mod_base = OTHER; note = 2'-O-methyluridine-3'-phosphate
  modified_base 7: mod_base = OTHER; note = 2'-deoxy-2'-fluorocytidine-3'-phosphate
  modified_base 8: mod_base = OTHER; note = 2'-O-methyluridine-3'-phosphate
  modified_base 9: mod_base = OTHER; note = 2'-deoxy-2'-fluorouridine-3'-phosphate
  modified_base 10: mod_base = OTHER; note = 2'-deoxy-2'-fluoroguanosine-3'-phosphate
  modified_base 11: mod_base = OTHER; note = 2'-deoxy-2'-fluorocytidine-3'-phosphate
  modified_base 12: mod_base = OTHER; note = 2'-O-methyluridine-3'-phosphate
  modified_base 13: mod_base = OTHER; note = 2'-O-methylcytidine-3'-phosphate
  modified_base 14: mod_base = OTHER; note = 2'-O-methyluridine-3'-phosphate
  modified_base 15: mod_base = OTHER; note = 2'-O-methyladenosine-3'-phosphate
  modified_base 16: mod_base = OTHER; note = 2'-O-methyluridine-3'-phosphate
  modified_base 17: mod_base = OTHER; note = 2'-O-methyladenosine-3'-phosphate
  modified_base 18: mod_base = OTHER; note = 2'-O-methyladenosine-3'-phosphate
  modified_base 19: mod_base = OTHER; note = 2'-O-methyladenosine-3'-phosphate
  modified_base 20: mod_base = OTHER; note = 2'-O-methylcytidine-3'-phosphate
  modified_base 21: mod_base = OTHER; note = 2'-O-methyladenosine-3'-phosphate conjugated at the 3'-end to an L96 ligand
agtgttcttgctctataaaca

SEQ ID NO: 379 - RNA, 21 nt, synthetic construct
  source 1..21: mol_type = other RNA
  modified_base 1: mod_base = OTHER; note = 2'-O-methyladenosine-3'-phosphorothioate
  modified_base 2: mod_base = OTHER; note = 2'-O-methylguanosine-3'-phosphorothioate
  modified_base 3: mod_base = OTHER; note = 2'-O-methyluridine-3'-phosphate
  modified_base 4: mod_base = OTHER; note = 2'-O-methylguanosine-3'-phosphate
  modified_base 5: mod_base = OTHER; note = 2'-O-methyluridine-3'-phosphate
  modified_base 6: mod_base = OTHER; note = 2'-O-methyluridine-3'-phosphate
  modified_base 7: mod_base = OTHER; note = 2'-deoxy-2'-fluorocytidine-3'-phosphate
  modified_base 8: mod_base = OTHER; note = 2'-O-methyluridine-3'-phosphate
  modified_base 9: mod_base = OTHER; note = 2'-deoxy-2'-fluorouridine-3'-phosphate
  modified_base 10: mod_base = OTHER; note = 2'-deoxy-2'-fluoroguanosine-3'-phosphate
  modified_base 11: mod_base = OTHER; note = 2'-deoxy-2'-fluorocytidine-3'-phosphate
  modified_base 12: mod_base = OTHER; note = 2'-O-methyluridine-3'-phosphate
  modified_base 13: mod_base = OTHER; note = 2'-O-methylcytidine-3'-phosphate
  modified_base 14: mod_base = OTHER; note = 2'-O-methyluridine-3'-phosphate
  modified_base 15: mod_base = OTHER; note = 2'-O-methyladenosine-3'-phosphate
  modified_base 16: mod_base = OTHER; note = 2'-O-methyluridine-3'-phosphate
  modified_base 17: mod_base = OTHER; note = 2'-O-methyladenosine-3'-phosphate
  modified_base 18: mod_base = OTHER; note = 2'-O-methyladenosine-3'-phosphate
  modified_base 19: mod_base = OTHER; note = 2'-O-methyladenosine-3'-phosphate
  modified_base 20: mod_base = OTHER; note = 2'-O-methylcytidine-3'-phosphate
  modified_base 21: mod_base = OTHER; note = 2'-O-methyladenosine-3'-phosphate conjugated at the 3'-end to an L96 ligand
agtgttcttgctctataaaca

SEQ ID NO: 380 - RNA, 21 nt, synthetic construct
  source 1..21: mol_type = other RNA
  modified_base 1: mod_base = OTHER; note = 2'-O-methyluridine-3'-phosphorothioate
  modified_base 2: mod_base = OTHER; note = 2'-O-methyluridine-3'-phosphorothioate
  modified_base 3: mod_base = OTHER; note = 2'-O-methylcytidine-3'-phosphate
  modified_base 4: mod_base = OTHER; note = 2'-O-methyluridine-3'-phosphate
  modified_base 5: mod_base = OTHER; note = 2'-O-methyluridine-3'-phosphate
  modified_base 6: mod_base = OTHER; note = 2'-O-methylguanosine-3'-phosphate
  modified_base 7: mod_base = OTHER; note = 2'-deoxy-2'-fluorocytidine-3'-phosphate
  modified_base 8: mod_base = OTHER; note = 2'-O-methyluridine-3'-phosphate
  modified_base 9: mod_base = OTHER; note = 2'-deoxy-2'-fluorocytidine-3'-phosphate
  modified_base 10: mod_base = OTHER; note = 2'-deoxy-2'-fluorouridine-3'-phosphate
  modified_base 11: mod_base = OTHER; note = 2'-deoxy-2'-fluoroadenosine-3'-phosphate
  modified_base 12: mod_base = OTHER; note = 2'-O-methyluridine-3'-phosphate
  modified_base 13: mod_base = OTHER; note = 2'-O-methyladenosine-3'-phosphate
  modified_base 14: mod_base = OTHER; note = 2'-O-methyladenosine-3'-phosphate
  modified_base 15: mod_base = OTHER; note = 2'-O-methyladenosine-3'-phosphate
  modified_base 16: mod_base = OTHER; note = 2'-O-methylcytidine-3'-phosphate
  modified_base 17: mod_base = OTHER; note = 2'-O-methylcytidine-3'-phosphate
  modified_base 18: mod_base = OTHER; note = 2'-O-methylguanosine-3'-phosphate
  modified_base 19: mod_base = OTHER; note = 2'-O-methyluridine-3'-phosphate
  modified_base 20: mod_base = OTHER; note = 2'-O-methylguanosine-3'-phosphate
  modified_base 21: mod_base = OTHER; note = 2'-O-methyluridine-3'-phosphate conjugated at the 3'-end to an L96 ligand
ttcttgctctataaaccgtgt

SEQ ID NO: 381 - RNA, 21 nt, synthetic construct
  source 1..21: mol_type = other RNA
  modified_base 1: mod_base = OTHER; note = 2'-O-methyladenosine-3'-phosphorothioate
  modified_base 2: mod_base = OTHER; note = 2'-O-methylguanosine-3'-phosphorothioate
  modified_base 3: mod_base = OTHER; note = 2'-O-methyluridine-3'-phosphate
  modified_base 4: mod_base = OTHER; note = 2'-O-methylguanosine-3'-phosphate
  modified_base 5: mod_base = OTHER; note = 2'-O-methyluridine-3'-phosphate
  modified_base 6: mod_base = OTHER; note = 2'-O-methyluridine-3'-phosphate
  modified_base 7: mod_base = OTHER; note = 2'-deoxy-2'-fluorocytidine-3'-phosphate
  modified_base 8: mod_base = OTHER; note = 2'-O-methyluridine-3'-phosphate
  modified_base 9: mod_base = OTHER; note = 2'-deoxy-2'-fluorouridine-3'-phosphate
  modified_base 10: mod_base = OTHER; note = 2'-deoxy-2'-fluoroguanosine-3'-phosphate
  modified_base 11: mod_base = OTHER; note = 2'-deoxy-2'-fluorocytidine-3'-phosphate
  modified_base 12: mod_base = OTHER; note = 2'-O-methyluridine-3'-phosphate
  modified_base 13: mod_base = OTHER; note = 2'-O-methylcytidine-3'-phosphate
  modified_base 14: mod_base = OTHER; note = 2'-O-methyluridine-3'-phosphate
  modified_base 15: mod_base = OTHER; note = 2'-O-methyladenosine-3'-phosphate
  modified_base 16: mod_base = OTHER; note = 2'-O-methyluridine-3'-phosphate
  modified_base 17: mod_base = OTHER; note = 2'-O-methyladenosine-3'-phosphate
  modified_base 18: mod_base = OTHER; note = 2'-O-methyladenosine-3'-phosphate
  modified_base 19: mod_base = OTHER; note = 2'-O-methyladenosine-3'-phosphate
  modified_base 20: mod_base = OTHER; note = 2'-O-methylcytidine-3'-phosphate
  modified_base 21: mod_base = OTHER; note = 2'-O-methyladenosine-3'-phosphate conjugated at the 3'-end to an L96 ligand
agtgttcttgctctataaaca

SEQ ID NO: 382 - RNA, 21 nt, synthetic construct
  source 1..21: mol_type = other RNA
  modified_base 1: mod_base = OTHER; note = 2'-O-methyladenosine-3'-phosphorothioate
  modified_base 2: mod_base = OTHER; note = 2'-O-methylguanosine-3'-phosphorothioate
  modified_base 3: mod_base = OTHER; note = 2'-O-methyluridine-3'-phosphate
  modified_base 4: mod_base = OTHER; note = 2'-O-methylguanosine-3'-phosphate
  modified_base 5: mod_base = OTHER; note = 2'-O-methyluridine-3'-phosphate
  modified_base 6: mod_base = OTHER; note = 2'-O-methyluridine-3'-phosphate
  modified_base 7: mod_base = OTHER; note = 2'-deoxy-2'-fluorocytidine-3'-phosphate
  modified_base 8: mod_base = OTHER; note = 2'-O-methyluridine-3'-phosphate
  modified_base 9: mod_base = OTHER; note = 2'-deoxy-2'-fluorouridine-3'-phosphate
  modified_base 10: mod_base = OTHER; note = 2'-deoxy-2'-fluoroguanosine-3'-phosphate
  modified_base 11: mod_base = OTHER; note = 2'-deoxy-2'-fluorocytidine-3'-phosphate
  modified_base 12: mod_base = OTHER; note = 2'-O-methyluridine-3'-phosphate
  modified_base 13: mod_base = OTHER; note = 2'-O-methylcytidine-3'-phosphate
  modified_base 14: mod_base = OTHER; note = 2'-O-methyluridine-3'-phosphate
  modified_base 15: mod_base = OTHER; note = 2'-O-methyladenosine-3'-phosphate
  modified_base 16: mod_base = OTHER; note = 2'-O-methyluridine-3'-phosphate
  modified_base 17: mod_base = OTHER; note = 2'-O-methyladenosine-3'-phosphate
  modified_base 18: mod_base = OTHER; note = 2'-O-methyladenosine-3'-phosphate
  modified_base 19: mod_base = OTHER; note = 2'-O-methyladenosine-3'-phosphate
  modified_base 20: mod_base = OTHER; note = 2'-O-methylcytidine-3'-phosphate
  modified_base 21: mod_base = OTHER; note = 2'-O-methyladenosine-3'-phosphate conjugated at the 3'-end to an L96 ligand
agtgttcttgctctataaaca

SEQ ID NO: 383 - RNA, 21 nt, synthetic construct
  source 1..21: mol_type = other RNA
  modified_base 1: mod_base = OTHER; note = 2'-O-methyladenosine-3'-phosphorothioate
  modified_base 2: mod_base = OTHER; note = 2'-O-methylguanosine-3'-phosphorothioate
  modified_base 3: mod_base = OTHER; note = 2'-O-methyluridine-3'-phosphate
  modified_base 4: mod_base = OTHER; note = 2'-O-methylguanosine-3'-phosphate
  modified_base 5: mod_base = OTHER; note = 2'-O-methyluridine-3'-phosphate
  modified_base 6: mod_base = OTHER; note = 2'-O-methyluridine-3'-phosphate
  modified_base 7: mod_base = OTHER; note = 2'-deoxy-2'-fluorocytidine-3'-phosphate
  modified_base 8: mod_base = OTHER; note = 2'-O-methyluridine-3'-phosphate
  modified_base 9: mod_base = OTHER; note = 2'-deoxy-2'-fluorouridine-3'-phosphate
  modified_base 10: mod_base = OTHER; note = 2'-deoxy-2'-fluoroguanosine-3'-phosphate
  modified_base 11: mod_base = OTHER; note = 2'-deoxy-2'-fluorocytidine-3'-phosphate
  modified_base 12: mod_base = OTHER; note = 2'-O-methyluridine-3'-phosphate
  modified_base 13: mod_base = OTHER; note = 2'-O-methylcytidine-3'-phosphate
  modified_base 14: mod_base = OTHER; note = 2'-O-methyluridine-3'-phosphate
  modified_base 15: mod_base = OTHER; note = 2'-O-methyladenosine-3'-phosphate
  modified_base 16: mod_base = OTHER; note = 2'-O-methyluridine-3'-phosphate
  modified_base 17: mod_base = OTHER; note = 2'-O-methyladenosine-3'-phosphate
  modified_base 18: mod_base = OTHER; note = 2'-O-methyladenosine-3'-phosphate
  modified_base 19: mod_base = OTHER; note = 2'-O-methyladenosine-3'-phosphate
  modified_base 20: mod_base = OTHER; note = 2'-O-methylcytidine-3'-phosphate
  modified_base 21: mod_base = OTHER; note = 2'-O-methyladenosine-3'-phosphate conjugated at the 3'-end to an L96 ligand
agtgttcttgctctataaaca

SEQ ID NO: 384 - RNA, 21 nt, synthetic construct
  source 1..21: mol_type = other RNA
  modified_base 1: mod_base = OTHER; note = 2'-O-methyluridine-3'-phosphorothioate
  modified_base 2: mod_base = OTHER; note = 2'-O-methyluridine-3'-phosphorothioate
  modified_base 3: mod_base = OTHER; note = 2'-O-methylcytidine-3'-phosphate
  modified_base 4: mod_base = OTHER; note = 2'-O-methyluridine-3'-phosphate
  modified_base 5: mod_base = OTHER; note = 2'-O-methyluridine-3'-phosphate
  modified_base 6: mod_base = OTHER; note = 2'-O-methylguanosine-3'-phosphate
  modified_base 7: mod_base = OTHER; note = 2'-deoxy-2'-fluorocytidine-3'-phosphate
  modified_base 8: mod_base = OTHER; note = 2'-O-methyluridine-3'-phosphate
  modified_base 9: mod_base = OTHER; note = 2'-deoxy-2'-fluorocytidine-3'-phosphate
  modified_base 10: mod_base = OTHER; note = 2'-deoxy-2'-fluorouridine-3'-phosphate
  modified_base 11: mod_base = OTHER; note = 2'-deoxy-2'-fluoroadenosine-3'-phosphate
  modified_base 12: mod_base = OTHER; note = 2'-O-methyluridine-3'-phosphate
  modified_base 13: mod_base = OTHER; note = 2'-O-methyladenosine-3'-phosphate
  modified_base 14: mod_base = OTHER; note = 2'-O-methyladenosine-3'-phosphate
  modified_base 15: mod_base = OTHER; note = 2'-O-methyladenosine-3'-phosphate
  modified_base 16: mod_base = OTHER; note = 2'-O-methylcytidine-3'-phosphate
  modified_base 17: mod_base = OTHER; note = 2'-O-methylcytidine-3'-phosphate
  modified_base 18: mod_base = OTHER; note = 2'-O-methylguanosine-3'-phosphate
  modified_base 19: mod_base = OTHER; note = 2'-O-methyluridine-3'-phosphate
  modified_base 20: mod_base = OTHER; note = 2'-O-methylguanosine-3'-phosphate
  modified_base 21: mod_base = OTHER; note = 2'-O-methyluridine-3'-phosphate conjugated at the 3'-end to an L96 ligand
ttcttgctctataaaccgtgt

SEQ ID NO: 385 - RNA, 21 nt, synthetic construct
  source 1..21: mol_type = other RNA
  modified_base 1: mod_base = OTHER; note = 2'-O-methyladenosine-3'-phosphorothioate
  modified_base 2: mod_base = OTHER; note = 2'-O-methylguanosine-3'-phosphorothioate
  modified_base 3: mod_base = OTHER; note = 2'-O-methyluridine-3'-phosphate
  modified_base 4: mod_base = OTHER; note = 2'-O-methylguanosine-3'-phosphate
  modified_base 5: mod_base = OTHER; note = 2'-O-methyluridine-3'-phosphate
  modified_base 6: mod_base = OTHER; note = 2'-O-methyluridine-3'-phosphate
  modified_base 7: mod_base = OTHER; note = 2'-deoxy-2'-fluorocytidine-3'-phosphate
  modified_base 8: mod_base = OTHER; note = 2'-O-methyluridine-3'-phosphate
  modified_base 9: mod_base = OTHER; note = 2'-deoxy-2'-fluorouridine-3'-phosphate
  modified_base 10: mod_base = OTHER; note = 2'-deoxy-2'-fluoroguanosine-3'-phosphate
  modified_base 11: mod_base = OTHER; note = 2'-deoxy-2'-fluorocytidine-3'-phosphate
  modified_base 12: mod_base = OTHER; note = 2'-O-methyluridine-3'-phosphate
  modified_base 13: mod_base = OTHER; note = 2'-O-methylcytidine-3'-phosphate
  modified_base 14: mod_base = OTHER; note = 2'-O-methyluridine-3'-phosphate
  modified_base 15: mod_base = OTHER; note = 2'-O-methyladenosine-3'-phosphate
  modified_base 16: mod_base = OTHER; note = 2'-O-methyluridine-3'-phosphate
  modified_base 17: mod_base = OTHER; note = 2'-O-methyladenosine-3'-phosphate
  modified_base 18: mod_base = OTHER; note = 2'-O-methyladenosine-3'-phosphate
  modified_base 19: mod_base = OTHER; note = 2'-O-methyladenosine-3'-phosphate
  modified_base 20: mod_base = OTHER; note = 2'-O-methylcytidine-3'-phosphate
  modified_base 21: mod_base = OTHER; note = 2'-O-methyladenosine-3'-phosphate conjugated at the 3'-end to an L96 ligand
agtgttcttgctctataaaca

SEQ ID NO: 386 - RNA, 21 nt, synthetic construct
  source 1..21: mol_type = other RNA
  modified_base 1: mod_base = OTHER; note = 2'-O-methyladenosine-3'-phosphorothioate
  modified_base 2: mod_base = OTHER; note = 2'-O-methylguanosine-3'-phosphorothioate
  modified_base 3: mod_base = OTHER; note = 2'-O-methyluridine-3'-phosphate
  modified_base 4: mod_base = OTHER; note = 2'-O-methylguanosine-3'-phosphate
  modified_base 5: mod_base = OTHER; note = 2'-O-methyluridine-3'-phosphate
  modified_base 6: mod_base = OTHER; note = 2'-O-methyluridine-3'-phosphate
  modified_base 7: mod_base = OTHER; note = 2'-deoxy-2'-fluorocytidine-3'-phosphate
  modified_base 8: mod_base = OTHER; note = 2'-O-methyluridine-3'-phosphate
  modified_base 9: mod_base = OTHER; note = 2'-deoxy-2'-fluorouridine-3'-phosphate
  modified_base 10: mod_base = OTHER; note = 2'-deoxy-2'-fluoroguanosine-3'-phosphate
  modified_base 11: mod_base = OTHER; note = 2'-deoxy-2'-fluorocytidine-3'-phosphate
  modified_base 12: mod_base = OTHER; note = 2'-O-methyluridine-3'-phosphate
  modified_base 13: mod_base = OTHER; note = 2'-O-methylcytidine-3'-phosphate
  modified_base 14: mod_base = OTHER; note = 2'-O-methyluridine-3'-phosphate
  modified_base 15: mod_base = OTHER; note = 2'-O-methyladenosine-3'-phosphate
  modified_base 16: mod_base = OTHER; note = 2'-O-methyluridine-3'-phosphate
  modified_base 17: mod_base = OTHER; note = 2'-O-methyladenosine-3'-phosphate
  modified_base 18: mod_base = OTHER; note = 2'-O-methyladenosine-3'-phosphate
  modified_base 19: mod_base = OTHER; note = 2'-O-methyladenosine-3'-phosphate
  modified_base 20: mod_base = OTHER; note = 2'-O-methylcytidine-3'-phosphate
  modified_base 21: mod_base = OTHER; note = 2'-O-methyladenosine-3'-phosphate conjugated at the 3'-end to an L96 ligand
agtgttcttgctctataaaca

SEQ ID NO: 387 - RNA, 21 nt, synthetic construct
  source 1..21: mol_type = other RNA
  modified_base 1: mod_base = OTHER; note = 2'-O-methyladenosine-3'-phosphorothioate
  modified_base 2: mod_base = OTHER; note = 2'-O-methylguanosine-3'-phosphorothioate
  modified_base 3: mod_base = OTHER; note = 2'-O-methyluridine-3'-phosphate
  modified_base 4: mod_base = OTHER; note = 2'-O-methylguanosine-3'-phosphate
  modified_base 5: mod_base = OTHER; note = 2'-O-methyluridine-3'-phosphate
  modified_base 6: mod_base = OTHER; note = 2'-O-methyluridine-3'-phosphate
  modified_base 7: mod_base = OTHER; note = 2'-deoxy-2'-fluorocytidine-3'-phosphate
  modified_base 8: mod_base = OTHER; note = 2'-O-methyluridine-3'-phosphate
  modified_base 9: mod_base = OTHER; note = 2'-deoxy-2'-fluorouridine-3'-phosphate
  modified_base 10: mod_base = OTHER; note = 2'-deoxy-2'-fluoroguanosine-3'-phosphate
  modified_base 11: mod_base = OTHER; note = 2'-deoxy-2'-fluorocytidine-3'-phosphate
  modified_base 12: mod_base = OTHER; note = 2'-O-methyluridine-3'-phosphate
  modified_base 13: mod_base = OTHER; note = 2'-O-methylcytidine-3'-phosphate
  modified_base 14: mod_base = OTHER; note = 2'-O-methyluridine-3'-phosphate
  modified_base 15: mod_base = OTHER; note = 2'-O-methyladenosine-3'-phosphate
  modified_base 16: mod_base = OTHER; note = 2'-O-methyluridine-3'-phosphate
  modified_base 17: mod_base = OTHER; note = 2'-O-methyladenosine-3'-phosphate
  modified_base 18: mod_base = OTHER; note = 2'-O-methyladenosine-3'-phosphate
  modified_base 19: mod_base = OTHER; note = 2'-O-methyladenosine-3'-phosphate
  modified_base 20: mod_base = OTHER; note = 2'-O-methylcytidine-3'-phosphate
  modified_base 21: mod_base = OTHER; note = 2'-O-methyladenosine-3'-phosphate conjugated at the 3'-end to an L96 ligand
agtgttcttgctctataaaca

SEQ ID NO: 388 - RNA, 21 nt, synthetic construct
  source 1..21: mol_type = other RNA
  modified_base 1: mod_base = OTHER; note = 2'-O-methyluridine-3'-phosphorothioate
  modified_base 2: mod_base = OTHER; note = 2'-O-methyluridine-3'-phosphorothioate
  modified_base 3: mod_base = OTHER; note = 2'-O-methylcytidine-3'-phosphate
  modified_base 4: mod_base = OTHER; note = 2'-O-methyluridine-3'-phosphate
  modified_base 5: mod_base = OTHER; note = 2'-O-methyluridine-3'-phosphate
  modified_base 6: mod_base = OTHER; note = 2'-O-methylguanosine-3'-phosphate
  modified_base 7: mod_base = OTHER; note = 2'-deoxy-2'-fluorocytidine-3'-phosphate
  modified_base 8: mod_base = OTHER; note = 2'-O-methyluridine-3'-phosphate
  modified_base 9: mod_base = OTHER; note = 2'-deoxy-2'-fluorocytidine-3'-phosphate
  modified_base 10: mod_base = OTHER; note = 2'-deoxy-2'-fluorouridine-3'-phosphate
  modified_base 11: mod_base = OTHER; note = 2'-deoxy-2'-fluoroadenosine-3'-phosphate
  modified_base 12: mod_base = OTHER; note = 2'-O-methyluridine-3'-phosphate
  modified_base 13: mod_base = OTHER; note = 2'-O-methyladenosine-3'-phosphate
  modified_base 14: mod_base = OTHER; note = 2'-O-methyladenosine-3'-phosphate
  modified_base 15: mod_base = OTHER; note = 2'-O-methyladenosine-3'-phosphate
  modified_base 16: mod_base = OTHER; note = 2'-O-methylcytidine-3'-phosphate
  modified_base 17: mod_base = OTHER; note = 2'-O-methylcytidine-3'-phosphate
  modified_base 18: mod_base = OTHER; note = 2'-O-methylguanosine-3'-phosphate
  modified_base 19: mod_base = OTHER; note = 2'-O-methyluridine-3'-phosphate
  modified_base 20: mod_base = OTHER; note = 2'-O-methylguanosine-3'-phosphate
  modified_base 21: mod_base = OTHER; note = 2'-O-methyluridine-3'-phosphate conjugated at the 3'-end to an L96 ligand
ttcttgctctataaaccgtgt

SEQ ID NO: 389 - RNA, 21 nt, synthetic construct
  source 1..21: mol_type = other RNA
  modified_base 1: mod_base = OTHER; note = 2'-O-methyladenosine-3'-phosphorothioate
  modified_base 2: mod_base = OTHER; note = 2'-O-methylguanosine-3'-phosphorothioate
  modified_base 3: mod_base = OTHER; note = 2'-O-methyluridine-3'-phosphate
  modified_base 4: mod_base = OTHER; note = 2'-O-methylguanosine-3'-phosphate
  modified_base 5: mod_base = OTHER; note = 2'-O-methyluridine-3'-phosphate
  modified_base 6: mod_base = OTHER; note = 2'-O-methyluridine-3'-phosphate
  modified_base 7: mod_base = OTHER; note = 2'-deoxy-2'-fluorocytidine-3'-phosphate
  modified_base 8: mod_base = OTHER; note = 2'-O-methyluridine-3'-phosphate
  modified_base 9: mod_base = OTHER; note = 2'-deoxy-2'-fluorouridine-3'-phosphate
  modified_base 10: mod_base = OTHER; note = 2'-deoxy-2'-fluoroguanosine-3'-phosphate
  modified_base 11: mod_base = OTHER; note = 2'-deoxy-2'-fluorocytidine-3'-phosphate
  modified_base 12: mod_base = OTHER; note = 2'-O-methyluridine-3'-phosphate
  modified_base 13: mod_base = OTHER; note = 2'-O-methylcytidine-3'-phosphate
  modified_base 14: mod_base = OTHER; note = 2'-O-methyluridine-3'-phosphate
  modified_base 15: mod_base = OTHER; note = 2'-O-methyladenosine-3'-phosphate
  modified_base 16: mod_base = OTHER; note = 2'-O-methyluridine-3'-phosphate
  modified_base 17: mod_base = OTHER; note = 2'-O-methyladenosine-3'-phosphate
  modified_base 18: mod_base = OTHER; note = 2'-O-methyladenosine-3'-phosphate
  modified_base 19: mod_base = OTHER; note = 2'-O-methyladenosine-3'-phosphate
  modified_base 20: mod_base = OTHER; note = 2'-O-methylcytidine-3'-phosphate
  modified_base 21: mod_base = OTHER; note = 2'-O-methyladenosine-3'-phosphate conjugated at the 3'-end to an L96 ligand
agtgttcttgctctataaaca

SEQ ID NO: 390 - RNA, 21 nt, synthetic construct
  source 1..21: mol_type = other RNA
  modified_base 1: mod_base = OTHER; note = 2'-O-methyladenosine-3'-phosphorothioate
  modified_base 2: mod_base = OTHER; note = 2'-O-methylguanosine-3'-phosphorothioate
  modified_base 3: mod_base = OTHER; note = 2'-O-methyluridine-3'-phosphate
  modified_base 4: mod_base = OTHER; note = 2'-O-methylguanosine-3'-phosphate
  modified_base 5: mod_base = OTHER; note = 2'-O-methyluridine-3'-phosphate
  modified_base 6: mod_base = OTHER; note = 2'-O-methyluridine-3'-phosphate
  modified_base 7: mod_base = OTHER; note = 2'-deoxy-2'-fluorocytidine-3'-phosphate
  modified_base 8: mod_base = OTHER; note = 2'-O-methyluridine-3'-phosphate
  modified_base 9: mod_base = OTHER; note = 2'-deoxy-2'-fluorouridine-3'-phosphate
  modified_base 10: mod_base = OTHER; note = 2'-deoxy-2'-fluoroguanosine-3'-phosphate
  modified_base 11: mod_base = OTHER; note = 2'-deoxy-2'-fluorocytidine-3'-phosphate
  modified_base 12: mod_base = OTHER; note = 2'-O-methyluridine-3'-phosphate
  modified_base 13: mod_base = OTHER; note = 2'-O-methylcytidine-3'-phosphate
  modified_base 14: mod_base = OTHER; note = 2'-O-methyluridine-3'-phosphate
  modified_base 15: mod_base = OTHER; note = 2'-O-methyladenosine-3'-phosphate
  modified_base 16: mod_base = OTHER; note = 2'-O-methyluridine-3'-phosphate
  modified_base 17: mod_base = OTHER; note = 2'-O-methyladenosine-3'-phosphate
  modified_base 18: mod_base = OTHER; note = 2'-O-methyladenosine-3'-phosphate
  modified_base 19: mod_base = OTHER; note = 2'-O-methyladenosine-3'-phosphate
  modified_base 20: mod_base = OTHER; note = 2'-O-methylcytidine-3'-phosphate
  modified_base 21: mod_base = OTHER; note = 2'-O-methyladenosine-3'-phosphate conjugated at the 3'-end to an L96 ligand
agtgttcttgctctataaaca

SEQ ID NO: 391 - RNA, 21 nt, synthetic construct
  source 1..21: mol_type = other RNA
  modified_base 1: mod_base = OTHER; note = 2'-O-methyluridine-3'-phosphorothioate
  modified_base 2: mod_base = OTHER; note = 2'-O-methyluridine-3'-phosphorothioate
  modified_base 3: mod_base = OTHER; note = 2'-O-methylcytidine-3'-phosphate
  modified_base 4: mod_base = OTHER; note = 2'-O-methyluridine-3'-phosphate
  modified_base 5: mod_base = OTHER; note = 2'-O-methyluridine-3'-phosphate
  modified_base 6: mod_base = OTHER; note = 2'-O-methylguanosine-3'-phosphate
  modified_base 7: mod_base = OTHER; note = 2'-deoxy-2'-fluorocytidine-3'-phosphate
  modified_base 8: mod_base = OTHER; note = 2'-O-methyluridine-3'-phosphate
  modified_base 9: mod_base = OTHER; note = 2'-deoxy-2'-fluorocytidine-3'-phosphate
  modified_base 10: mod_base = OTHER; note = 2'-deoxy-2'-fluorouridine-3'-phosphate
  modified_base 11: mod_base = OTHER; note = 2'-deoxy-2'-fluoroadenosine-3'-phosphate
  modified_base 12: mod_base = OTHER; note = 2'-O-methyluridine-3'-phosphate
  modified_base 13: mod_base = OTHER; note = 2'-O-methyladenosine-3'-phosphate
  modified_base 14: mod_base = OTHER; note = 2'-O-methyladenosine-3'-phosphate
  modified_base 15: mod_base = OTHER; note = 2'-O-methyladenosine-3'-phosphate
  modified_base 16: mod_base = OTHER; note = 2'-O-methylcytidine-3'-phosphate
  modified_base 17: mod_base = OTHER; note = 2'-O-methylcytidine-3'-phosphate
  modified_base 18: mod_base = OTHER; note = 2'-O-methylguanosine-3'-phosphate
  modified_base 19: mod_base = OTHER; note = 2'-O-methyluridine-3'-phosphate
  modified_base 20: mod_base = OTHER; note = 2'-O-methylguanosine-3'-phosphate
  modified_base 21: mod_base = OTHER; note = 2'-O-methyluridine-3'-phosphate conjugated at the 3'-end to an L96 ligand
ttcttgctctataaaccgtgt

SEQ ID NO: 392 - RNA, 21 nt, synthetic construct
  source 1..21: mol_type = other RNA
  modified_base 1: mod_base = OTHER; note = 2'-O-methyladenosine-3'-phosphorothioate
  modified_base 2: mod_base = OTHER; note = 2'-O-methylguanosine-3'-phosphorothioate
  modified_base 3: mod_base = OTHER; note = 2'-O-methyluridine-3'-phosphate
  modified_base 4: mod_base = OTHER; note = 2'-O-methylguanosine-3'-phosphate
  modified_base 5: mod_base = OTHER; note = 2'-O-methyluridine-3'-phosphate
  modified_base 6: mod_base = OTHER; note = 2'-O-methyluridine-3'-phosphate
  modified_base 7: mod_base = OTHER; note = 2'-deoxy-2'-fluorocytidine-3'-phosphate
  modified_base 8: mod_base = OTHER; note = 2'-O-methyluridine-3'-phosphate
  modified_base 9: mod_base = OTHER; note = 2'-deoxy-2'-fluorouridine-3'-phosphate
  modified_base 10: mod_base = OTHER; note = 2'-deoxy-2'-fluoroguanosine-3'-phosphate
  modified_base 11: mod_base = OTHER; note = 2'-deoxy-2'-fluorocytidine-3'-phosphate
  modified_base 12: mod_base = OTHER; note = 2'-O-methyluridine-3'-phosphate
  modified_base 13: mod_base = OTHER; note = 2'-O-methylcytidine-3'-phosphate
  modified_base 14: mod_base = OTHER; note = 2'-O-methyluridine-3'-phosphate
  modified_base 15: mod_base = OTHER; note = 2'-O-methyladenosine-3'-phosphate
  modified_base 16: mod_base = OTHER; note = 2'-O-methyluridine-3'-phosphate
  modified_base 17: mod_base = OTHER; note = 2'-O-methyladenosine-3'-phosphate
  modified_base 18: mod_base = OTHER; note = 2'-O-methyladenosine-3'-phosphate
  modified_base 19: mod_base = OTHER; note = 2'-O-methyladenosine-3'-phosphate
  modified_base 20: mod_base = OTHER; note = 2'-O-methylcytidine-3'-phosphate
  modified_base 21: mod_base = OTHER; note = 2'-O-methyladenosine-3'-phosphate conjugated at the 3'-end to an L96 ligand
agtgttcttgctctataaaca

SEQ ID NO: 393 - RNA, 21 nt, synthetic construct
  source 1..21: mol_type = other RNA
  modified_base 1: mod_base = OTHER; note = 2'-O-methyladenosine-3'-phosphorothioate
  modified_base 2: mod_base = OTHER; note = 2'-O-methylguanosine-3'-phosphorothioate
  modified_base 3: mod_base = OTHER; note = 2'-O-methyluridine-3'-phosphate
  modified_base 4: mod_base = OTHER; note = 2'-O-methylguanosine-3'-phosphate
  modified_base 5: mod_base = OTHER; note = 2'-O-methyluridine-3'-phosphate
  modified_base 6: mod_base = OTHER; note = 2'-O-methyluridine-3'-phosphate
  modified_base 7: mod_base = OTHER; note = 2'-deoxy-2'-fluorocytidine-3'-phosphate
  modified_base 8: mod_base = OTHER; note = 2'-O-methyluridine-3'-phosphate
  modified_base 9: mod_base = OTHER; note = 2'-deoxy-2'-fluorouridine-3'-phosphate
  modified_base 10: mod_base = OTHER; note = 2'-deoxy-2'-fluoroguanosine-3'-phosphate
  modified_base 11: mod_base = OTHER; note = 2'-deoxy-2'-fluorocytidine-3'-phosphate
  modified_base 12: mod_base = OTHER; note = 2'-O-methyluridine-3'-phosphate
  modified_base 13: mod_base = OTHER; note = 2'-O-methylcytidine-3'-phosphate
  modified_base 14: mod_base = OTHER; note = 2'-O-methyluridine-3'-phosphate
  modified_base 15: mod_base = OTHER; note = 2'-O-methyladenosine-3'-phosphate
  modified_base 16: mod_base = OTHER; note = 2'-O-methyluridine-3'-phosphate
  modified_base 17: mod_base = OTHER; note = 2'-O-methyladenosine-3'-phosphate
  modified_base 18: mod_base = OTHER; note = 2'-O-methyladenosine-3'-phosphate
  modified_base 19: mod_base = OTHER; note = 2'-O-methyladenosine-3'-phosphate
  modified_base 20: mod_base = OTHER; note = 2'-O-methylcytidine-3'-phosphate
  modified_base 21: mod_base = OTHER; note = 2'-O-methyladenosine-3'-phosphate conjugated at the 3'-end to an L96 ligand
agtgttcttgctctataaaca

SEQ ID NO: 394 - RNA, 21 nt, synthetic construct
  source 1..21: mol_type = other RNA
  modified_base 1: mod_base = OTHER; note = 2'-O-methyluridine-3'-phosphorothioate
  modified_base 2: mod_base = OTHER; note = 2'-O-methyluridine-3'-phosphorothioate
  modified_base 3: mod_base = OTHER; note = 2'-O-methylcytidine-3'-phosphate
  modified_base 4: mod_base = OTHER; note = 2'-O-methyluridine-3'-phosphate
  modified_base 5: mod_base = OTHER; note = 2'-O-methyluridine-3'-phosphate
  modified_base 6: mod_base = OTHER; note = 2'-O-methylguanosine-3'-phosphate
  modified_base 7: mod_base = OTHER; note = 2'-deoxy-2'-fluorocytidine-3'-phosphate
  modified_base 8: mod_base = OTHER; note = 2'-O-methyluridine-3'-phosphate
  modified_base 9: mod_base = OTHER; note = 2'-deoxy-2'-fluorocytidine-3'-phosphate
  modified_base 10: mod_base = OTHER; note = 2'-deoxy-2'-fluorouridine-3'-phosphate
  modified_base 11: mod_base = OTHER; note = 2'-deoxy-2'-fluoroadenosine-3'-phosphate
  modified_base 12: mod_base = OTHER; note = 2'-O-methyluridine-3'-phosphate
  modified_base 13: mod_base = OTHER; note = 2'-O-methyladenosine-3'-phosphate
  modified_base 14: mod_base = OTHER; note = 2'-O-methyladenosine-3'-phosphate
  modified_base 15: mod_base = OTHER; note = 2'-O-methyladenosine-3'-phosphate
  modified_base 16: mod_base = OTHER; note = 2'-O-methylcytidine-3'-phosphate
  modified_base 17: mod_base = OTHER; note = 2'-O-methylcytidine-3'-phosphate
  modified_base 18: mod_base = OTHER; note = 2'-O-methylguanosine-3'-phosphate
  modified_base 19: mod_base = OTHER; note = 2'-O-methyluridine-3'-phosphate
  modified_base 20: mod_base = OTHER; note = 2'-O-methylguanosine-3'-phosphate
  modified_base 21: mod_base = OTHER; note = 2'-O-methyluridine-3'-phosphate conjugated at the 3'-end to an L96 ligand
ttcttgctctataaaccgtgt

SEQ ID NO: 395 - RNA, 21 nt, synthetic construct
  source 1..21: mol_type = other RNA
  modified_base 1: mod_base = OTHER; note = 2'-O-methyladenosine-3'-phosphorothioate
  modified_base 2: mod_base = OTHER; note = 2'-O-methylguanosine-3'-phosphorothioate
  modified_base 3: mod_base = OTHER; note = 2'-O-methyluridine-3'-phosphate
  modified_base 4: mod_base = OTHER; note = 2'-O-methylguanosine-3'-phosphate
  modified_base 5: mod_base = OTHER; note = 2'-O-methyluridine-3'-phosphate
  modified_base 6: mod_base = OTHER; note = 2'-O-methyluridine-3'-phosphate
  modified_base 7: mod_base = OTHER; note = 2'-deoxy-2'-fluorocytidine-3'-phosphate
  modified_base 8: mod_base = OTHER; note = 2'-O-methyluridine-3'-phosphate
  modified_base 9: mod_base = OTHER; note = 2'-deoxy-2'-fluorouridine-3'-phosphate
  modified_base 10: mod_base = OTHER; note = 2'-deoxy-2'-fluoroguanosine-3'-phosphate
  modified_base 11: mod_base = OTHER; note = 2'-deoxy-2'-fluorocytidine-3'-phosphate
  modified_base 12: mod_base = OTHER; note = 2'-O-methyluridine-3'-phosphate
  modified_base 13: mod_base = OTHER; note = 2'-O-methylcytidine-3'-phosphate
  modified_base 14: mod_base = OTHER; note = 2'-O-methyluridine-3'-phosphate
  modified_base 15: mod_base = OTHER; note = 2'-O-methyladenosine-3'-phosphate
  modified_base 16: mod_base = OTHER; note = 2'-O-methyluridine-3'-phosphate
  modified_base 17: mod_base = OTHER; note = 2'-O-methyladenosine-3'-phosphate
  modified_base 18: mod_base = OTHER; note = 2'-O-methyladenosine-3'-phosphate
  modified_base 19: mod_base = OTHER; note = 2'-O-methyladenosine-3'-phosphate
  modified_base 20: mod_base = OTHER; note = 2'-O-methylcytidine-3'-phosphate
  modified_base 21: mod_base = OTHER; note = 2'-O-methyladenosine-3'-phosphate conjugated at the 3'-end to an L96 ligand
agtgttcttgctctataaaca

SEQ ID NO: 396 - RNA, 21 nt, synthetic construct
  source 1..21: mol_type = other RNA
  modified_base 1: mod_base = OTHER; note = 2'-O-methyladenosine-3'-phosphorothioate
  modified_base 2: mod_base = OTHER; note = 2'-O-methylguanosine-3'-phosphorothioate
  modified_base 3: mod_base = OTHER; note = 2'-O-methyluridine-3'-phosphate
  modified_base 4: mod_base = OTHER; note = 2'-O-methylguanosine-3'-phosphate
  modified_base 5: mod_base = OTHER; note = 2'-O-methyluridine-3'-phosphate
  modified_base 6: mod_base = OTHER; note = 2'-O-methyluridine-3'-phosphate
  modified_base 7: mod_base = OTHER; note = 2'-deoxy-2'-fluorocytidine-3'-phosphate
  modified_base 8: mod_base = OTHER; note = 2'-O-methyluridine-3'-phosphate
  modified_base 9: mod_base = OTHER; note = 2'-deoxy-2'-fluorouridine-3'-phosphate
  modified_base 10: mod_base = OTHER; note = 2'-deoxy-2'-fluoroguanosine-3'-phosphate
  modified_base 11: mod_base = OTHER; note = 2'-deoxy-2'-fluorocytidine-3'-phosphate
  modified_base 12: mod_base = OTHER; note = 2'-O-methyluridine-3'-phosphate
  modified_base 13: mod_base = OTHER; note = 2'-O-methylcytidine-3'-phosphate
  modified_base 14: mod_base = OTHER; note = 2'-O-methyluridine-3'-phosphate
  modified_base 15: mod_base = OTHER; note = 2'-O-methyladenosine-3'-phosphate
  modified_base 16: mod_base = OTHER; note = 2'-O-methyluridine-3'-phosphate
  modified_base 17: mod_base = OTHER; note = 2'-O-methyladenosine-3'-phosphate
  modified_base 18: mod_base = OTHER; note = 2'-O-methyladenosine-3'-phosphate
  modified_base 19: mod_base = OTHER; note = 2'-O-methyladenosine-3'-phosphate
  modified_base 20: mod_base = OTHER; note = 2'-O-methylcytidine-3'-phosphate
  modified_base 21: mod_base = OTHER; note = 2'-O-methyladenosine-3'-phosphate conjugated at the 3'-end to an L96 ligand
agtgttcttgctctataaaca

SEQ ID NO: 397 - RNA, 23 nt, synthetic construct
  source 1..23: mol_type = other RNA
  modified_base 1: mod_base = OTHER; note = 2'-O-methyladenosine-3'-phosphorothioate
  modified_base 2: mod_base = OTHER; note = 2'-deoxy-2'-fluorocytidine-3'-phosphorothioate
  modified_base 3: mod_base = OTHER; note = 2'-O-methyladenosine-3'-phosphate
  modified_base 4: mod_base = OTHER; note = 2'-O-methylcytidine-3'-phosphate
  modified_base 5: mod_base = OTHER; note = 2'-O-methylguanosine-3'-phosphate
  modified_base 6: mod_base = OTHER; note = 2'-O-methylguanosine-3'-phosphate
  modified_base 7: mod_base = OTHER; note = 2'-O-methyluridine-3'-phosphate
  modified_base 8: mod_base = OTHER; note = 2'-O-methyluridine-3'-phosphate
  modified_base 9: mod_base = OTHER; note = 2'-O-methyluridine-3'-phosphate
  modified_base 10: mod_base = OTHER; note = 2'-O-methyladenosine-3'-phosphate
  modified_base 11: mod_base = OTHER; note = 2'-O-methyluridine-3'-phosphate
  modified_base 12: mod_base = OTHER; note = 2'-O-methyladenosine-3'-phosphate
  modified_base 13: mod_base = OTHER; note = 2'-O-methylguanosine-3'-phosphate
  modified_base 14: mod_base = OTHER; note = 2'-deoxy-2'-fluoroadenosine-3'-phosphate
  modified_base 15: mod_base = OTHER; note = 2'-O-methylguanosine-3'-phosphate
  modified_base 16: mod_base = OTHER; note = 2'-deoxy-2'-fluorocytidine-3'-phosphate
  modified_base 17: mod_base = OTHER; note = 2'-O-methyladenosine-3'-phosphate
  modified_base 18: mod_base = OTHER; note = 2'-O-methyladenosine-3'-phosphate
  modified_base 19: mod_base = OTHER; note = 2'-O-methylguanosine-3'-phosphate
  modified_base 20: mod_base = OTHER; note = 2'-O-methyladenosine-3'-phosphate
  modified_base 21: mod_base = OTHER; note = 2'-O-methyladenosine-3'-phosphorothioate
  modified_base 22: mod_base = OTHER; note = 2'-O-methylcytidine-3'-phosphorothioate
  modified_base 23: mod_base = OTHER; note = 2'-O-methyladenosine
acacggtttatagagcaagaaca

SEQ ID NO: 398 - RNA, 23 nt, synthetic construct
  source 1..23: mol_type = other RNA
  modified_base 1: mod_base = OTHER; note = 2'-O-methyladenosine-3'-phosphorothioate
  modified_base 2: mod_base = OTHER; note = 2'-deoxy-2'-fluorocytidine-3'-phosphorothioate
  modified_base 3: mod_base = OTHER; note = 2'-O-methyladenosine-3'-phosphate
  modified_base 4: mod_base = OTHER; note = 2'-O-methylcytidine-3'-phosphate
  modified_base 5: mod_base = OTHER; note = 2'-O-methylguanosine-3'-phosphate
  modified_base 6: mod_base = OTHER; note = 2'-O-methylguanosine-3'-phosphate
  modified_base 7: mod_base = OTHER; note 2-(1R-(uracil-1-yl)-2-hydroxyethoxy)-(2R,3R)-1,3-dihydroxyb utane 3-phosphate
  modified_base 8: mod_base = OTHER; note = 2'-O-methyluridine-3'-phosphate
  modified_base 9: mod_base = OTHER; note = 2'-O-methyluridine-3'-phosphate
  modified_base 10: mod_base = OTHER; note = 2'-O-methyladenosine-3'-phosphate
  modified_base 11: mod_base = OTHER; note = 2'-O-methyluridine-3'-phosphate
  modified_base 12: mod_base = OTHER; note = 2'-O-methyladenosine-3'-phosphate
  modified_base 13: mod_base = OTHER; note = 2'-O-methylguanosine-3'-phosphate
  modified_base 14: mod_base = OTHER; note = 2'-deoxy-2'-fluoroadenosine-3'-phosphate
  modified_base 15: mod_base = OTHER; note = 2'-O-methylguanosine-3'-phosphate
  modified_base 16: mod_base = OTHER; note = 2'-deoxy-2'-fluorocytidine-3'-phosphate
  modified_base 17: mod_base = OTHER; note = 2'-O-methyladenosine-3'-phosphate
  modified_base 18: mod_base = OTHER; note = 2'-O-methyladenosine-3'-phosphate
  modified_base 19: mod_base = OTHER; note = 2'-O-methylguanosine-3'-phosphate
  modified_base 20: mod_base = OTHER; note = 2'-O-methyladenosine-3'-phosphate
  modified_base 21: mod_base = OTHER; note = 2'-O-methyladenosine-3'-phosphorothioate
  modified_base 22: mod_base = OTHER; note = 2'-O-methylcytidine-3'-phosphorothioate
  modified_base 23: mod_base = OTHER; note = 2'-O-methyladenosine
acacggtttatagagcaagaaca

SEQ ID NO: 399 - RNA, 23 nt, synthetic construct
  source 1..23: mol_type = other RNA
  modified_base 1: mod_base = OTHER; note = 2'-O-methyluridine-3'-phosphorothioate
  modified_base 2: mod_base = OTHER; note = 2'-deoxy-2'-fluoroguanosine-3'-phosphorothioate
  modified_base 3: mod_base = OTHER; note = 2'-O-methyluridine-3'-phosphate
  modified_base 4: mod_base = OTHER; note = 2'-O-methyluridine-3'-phosphate
  modified_base 5: mod_base = OTHER; note 2-(1R-(uracil-1-yl)-2R-hydroxypropoxy)-1,3-dihydroxybutane 1-phosphate
  modified_base 6: mod_base = OTHER; note = 2'-O-methyladenosine-3'-phosphate
  modified_base 7: mod_base = OTHER; note = 2'-O-methyluridine-3'-phosphate
  modified_base 8: mod_base = OTHER; note = 2'-O-methyladenosine-3'-phosphate
  modified_base 9: mod_base = OTHER; note = 2'-O-methylguanosine-3'-phosphate
  modified_base 10: mod_base = OTHER; note = 2'-O-methyladenosine-3'-phosphate
  modified_base 11: mod_base = OTHER; note = 2'-O-methylguanosine-3'-phosphate
  modified_base 12: mod_base = OTHER; note = 2'-O-methylcytidine-3'-phosphate
  modified_base 13: mod_base = OTHER; note = 2'-O-methyladenosine-3'-phosphate
  modified_base 14: mod_base = OTHER; note = 2'-deoxy-2'-fluoroadenosine-3'-phosphate
  modified_base 15: mod_base = OTHER; note = 2'-O-methylguanosine-3'-phosphate
  modified_base 16: mod_base = OTHER; note = 2'-deoxy-2'-fluoroadenosine-3'-phosphate
  modified_base 17: mod_base = OTHER; note = 2'-O-methyladenosine-3'-phosphate
  modified_base 18: mod_base = OTHER; note = 2'-O-methylcytidine-3'-phosphate
  modified_base 19: mod_base = OTHER; note = 2'-O-methyladenosine-3'-phosphate
  modified_base 20: mod_base = OTHER; note = 2'-O-methylcytidine-3'-phosphate
  modified_base 21: mod_base = OTHER; note = 2'-O-methyluridine-3'-phosphorothioate
  modified_base 22: mod_base = OTHER; note = 2'-O-methylguanosine-3'-phosphorothioate
  modified_base 23: mod_base = OTHER; note = 2'-O-methyluridine
tgtttatagagcaagaacactgt

SEQ ID NO: 400 - RNA, 23 nt, synthetic construct
  source 1..23: mol_type = other RNA
  modified_base 1: mod_base = OTHER; note = 2'-O-methyluridine-3'-phosphorothioate
  modified_base 2: mod_base = OTHER; note = 2'-deoxy-2'-fluoroguanosine-3'-phosphorothioate
  modified_base 3: mod_base = OTHER; note = 2'-O-methyluridine-3'-phosphate
  modified_base 4: mod_base = OTHER; note = 2'-O-methyluridine-3'-phosphate
  modified_base 5: mod_base = OTHER; note = 2'-O-methyluridine-3'-phosphate
  modified_base 6: mod_base = OTHER; note = 2'-O-methyladenosine-3'-phosphate
  modified_base 7: mod_base = OTHER; note 2-(1R-(uracil-1-yl)-2S-hydroxypropoxy)-1,3-dihydroxybutane 1-phosphate
  modified_base 8: mod_base = OTHER; note = 2'-O-methyladenosine-3'-phosphate
  modified_base 9: mod_base = OTHER; note = 2'-O-methylguanosine-3'-phosphate
  modified_base 10: mod_base = OTHER; note = 2'-O-methyladenosine-3'-phosphate
  modified_base 11: mod_base = OTHER; note = 2'-O-methylguanosine-3'-phosphate
  modified_base 12: mod_base = OTHER; note = 2'-O-methylcytidine-3'-phosphate
  modified_base 13: mod_base = OTHER; note = 2'-O-methyladenosine-3'-phosphate
  modified_base 14: mod_base = OTHER; note = 2'-deoxy-2'-fluoroadenosine-3'-phosphate
  modified_base 15: mod_base = OTHER; note = 2'-O-methylguanosine-3'-phosphate
  modified_base 16: mod_base = OTHER; note = 2'-deoxy-2'-fluoroadenosine-3'-phosphate
  modified_base 17: mod_base = OTHER; note = 2'-O-methyladenosine-3'-phosphate
  modified_base 18: mod_base = OTHER; note = 2'-O-methylcytidine-3'-phosphate
  modified_base 19: mod_base = OTHER; note = 2'-O-methyladenosine-3'-phosphate
  modified_base 20: mod_base = OTHER; note = 2'-O-methylcytidine-3'-phosphate
  modified_base 21: mod_base = OTHER; note = 2'-O-methyluridine-3'-phosphorothioate
  modified_base 22: mod_base = OTHER; note = 2'-O-methylguanosine-3'-phosphorothioate
  modified_base 23: mod_base = OTHER; note = 2'-O-methyluridine
tgtttatagagcaagaacactgt

SEQ ID NO: 401 - RNA, 23 nt, synthetic construct
  source 1..23: mol_type = other RNA
  modified_base 1: mod_base = OTHER; note = 2'-O-methyladenosine-3'-phosphorothioate
  modified_base 2: mod_base = OTHER; note = 2'-deoxy-2'-fluorocytidine-3'-phosphorothioate
  modified_base 3: mod_base = OTHER; note = 2'-O-methyladenosine-3'-phosphate
  modified_base 4: mod_base = OTHER; note = 2'-O-methylcytidine-3'-phosphate
  modified_base 5: mod_base = OTHER; note = 2'-O-methylguanosine-3'-phosphate
  modified_base 6: mod_base = OTHER; note = 2'-O-methylguanosine-3'-phosphate
  modified_base 7: mod_base = OTHER; note = Thymidine-glycol nucleic acid (GNA), S-Isomer
  modified_base 8: mod_base = OTHER; note = 2'-O-methyluridine-3'-phosphate
  modified_base 9: mod_base = OTHER; note = 2'-O-methyluridine-3'-phosphate
  modified_base 10: mod_base = OTHER; note = 2'-O-methyladenosine-3'-phosphate
  modified_base 11: mod_base = OTHER; note = 2'-O-methyluridine-3'-phosphate
  modified_base 12: mod_base = OTHER; note = 2'-O-methyladenosine-3'-phosphate
  modified_base 13: mod_base = OTHER; note = 2'-O-methylguanosine-3'-phosphate
  modified_base 14: mod_base = OTHER; note = 2'-deoxy-2'-fluoroadenosine-3'-phosphate
  modified_base 15: mod_base = OTHER; note = 2'-O-methylguanosine-3'-phosphate
  modified_base 16: mod_base = OTHER; note = 2'-deoxy-2'-fluorocytidine-3'-phosphate
  modified_base 17: mod_base = OTHER; note = 2'-O-methyladenosine-3'-phosphate
  modified_base 18: mod_base = OTHER; note = 2'-O-methyladenosine-3'-phosphate
  modified_base 19: mod_base = OTHER; note = 2'-O-methylguanosine-3'-phosphate
  modified_base 20: mod_base = OTHER; note = 2'-O-methyladenosine-3'-phosphate
  modified_base 21: mod_base = OTHER; note = 2'-O-methyladenosine-3'-phosphorothioate
  modified_base 22: mod_base = OTHER; note = 2'-O-methylcytidine-3'-phosphorothioate
  modified_base 23: mod_base = OTHER; note = 2'-O-methyladenosine
acacggtttatagagcaagaaca

SEQ ID NO: 402 - RNA, 23 nt, synthetic construct
  source 1..23: mol_type = other RNA
  modified_base 1: mod_base = OTHER; note = 2'-O-methyluridine-3'-phosphorothioate
  modified_base 2: mod_base = OTHER; note = 2'-deoxy-2'-fluoroguanosine-3'-phosphorothioate
  modified_base 3: mod_base = OTHER; note = 2'-O-methyluridine-3'-phosphate
  modified_base 4: mod_base = OTHER; note = 2'-O-methyluridine-3'-phosphate
  modified_base 5: mod_base = OTHER; note 2-(1R-(uracil-1-yl)-2-hydroxyethoxy)-(2R,3S)-1,3-dihydroxyb utane 3-phosphate
  modified_base 6: mod_base = OTHER; note = 2'-O-methyladenosine-3'-phosphate
  modified_base 7: mod_base = OTHER; note = 2'-O-methyluridine-3'-phosphate
  modified_base 8: mod_base = OTHER; note = 2'-O-methyladenosine-3'-phosphate
  modified_base 9: mod_base = OTHER; note = 2'-O-methylguanosine-3'-phosphate
  modified_base 10: mod_base = OTHER; note = 2'-O-methyladenosine-3'-phosphate
  modified_base 11: mod_base = OTHER; note = 2'-O-methylguanosine-3'-phosphate
  modified_base 12: mod_base = OTHER; note = 2'-O-methylcytidine-3'-phosphate
  modified_base 13: mod_base = OTHER; note = 2'-O-methyladenosine-3'-phosphate
  modified_base 14: mod_base = OTHER; note = 2'-deoxy-2'-fluoroadenosine-3'-phosphate
  modified_base 15: mod_base = OTHER; note = 2'-O-methylguanosine-3'-phosphate
  modified_base 16: mod_base = OTHER; note = 2'-deoxy-2'-fluoroadenosine-3'-phosphate
  modified_base 17: mod_base = OTHER; note = 2'-O-methyladenosine-3'-phosphate
  modified_base 18: mod_base = OTHER; note = 2'-O-methylcytidine-3'-phosphate
  modified_base 19: mod_base = OTHER; note = 2'-O-methyladenosine-3'-phosphate
  modified_base 20: mod_base = OTHER; note = 2'-O-methylcytidine-3'-phosphate
  modified_base 21: mod_base = OTHER; note = 2'-O-methyluridine-3'-phosphorothioate
  modified_base 22: mod_base = OTHER; note = 2'-O-methylguanosine-3'-phosphorothioate
  modified_base 23: mod_base = OTHER; note = 2'-O-methyluridine
tgtttatagagcaagaacactgt

SEQ ID NO: 403 - RNA, 23 nt, synthetic construct
  source 1..23: mol_type = other RNA
  modified_base 1: mod_base = OTHER; note = 2'-O-methyluridine-3'-phosphorothioate
  modified_base 2: mod_base = OTHER; note = 2'-deoxy-2'-fluoroguanosine-3'-phosphorothioate
  modified_base 3: mod_base = OTHER; note = 2'-O-methyluridine-3'-phosphate
  modified_base 4: mod_base = OTHER; note = 2'-O-methyluridine-3'-phosphate
  modified_base 5: mod_base = OTHER; note = 2'-O-methyluridine-3'-phosphate
  modified_base 6: mod_base = OTHER; note = 2'-O-methyladenosine-3'-phosphate
  modified_base 7: mod_base = OTHER; note 2-(1R-(uracil-1-yl)-2R-hydroxypropoxy)-1,3-dihydroxybutane 1-phosphate
  modified_base 8: mod_base = OTHER; note = 2'-O-methyladenosine-3'-phosphate
  modified_base 9: mod_base = OTHER; note = 2'-O-methylguanosine-3'-phosphate
  modified_base 10: mod_base = OTHER; note = 2'-O-methyladenosine-3'-phosphate
  modified_base 11: mod_base = OTHER; note = 2'-O-methylguanosine-3'-phosphate
  modified_base 12: mod_base = OTHER; note = 2'-O-methylcytidine-3'-phosphate
  modified_base 13: mod_base = OTHER; note = 2'-O-methyladenosine-3'-phosphate
  modified_base 14: mod_base = OTHER; note = 2'-deoxy-2'-fluoroadenosine-3'-phosphate
  modified_base 15: mod_base = OTHER; note = 2'-O-methylguanosine-3'-phosphate
  modified_base 16: mod_base = OTHER; note = 2'-deoxy-2'-fluoroadenosine-3'-phosphate
  modified_base 17: mod_base = OTHER; note = 2'-O-methyladenosine-3'-phosphate
  modified_base 18: mod_base = OTHER; note = 2'-O-methylcytidine-3'-phosphate
  modified_base 19: mod_base = OTHER; note = 2'-O-methyladenosine-3'-phosphate
  modified_base 20: mod_base = OTHER; note = 2'-O-methylcytidine-3'-phosphate
  modified_base 21: mod_base = OTHER; note = 2'-O-methyluridine-3'-phosphorothioate
  modified_base 22: mod_base = OTHER; note = 2'-O-methylguanosine-3'-phosphorothioate
  modified_base 23: mod_base = OTHER; note = 2'-O-methyluridine
tgtttatagagcaagaacactgt

SEQ ID NO: 404 - RNA, 23 nt, synthetic construct
  source 1..23: mol_type = other RNA
  modified_base 1: mod_base = OTHER; note = 2'-O-methyladenosine-3'-phosphorothioate
  modified_base 2: mod_base = OTHER; note = 2'-deoxy-2'-fluorocytidine-3'-phosphorothioate
  modified_base 3: mod_base = OTHER; note = 2'-O-methyladenosine-3'-phosphate
  modified_base 4: mod_base = OTHER; note = 2'-O-methylcytidine-3'-phosphate
  modified_base 5: mod_base = OTHER; note = 2'-O-methylguanosine-3'-phosphate
  modified_base 6: mod_base = OTHER; note = 2'-O-methylguanosine-3'-phosphate
  modified_base 7: mod_base = OTHER; note 2-(1R-(uracil-1-yl)-2-hydroxyethoxy)-1,3-dihydroxypropane 3-phosphate
  modified_base 8: mod_base = OTHER; note = 2'-O-methyluridine-3'-phosphate
  modified_base 9: mod_base = OTHER; note = 2'-O-methyluridine-3'-phosphate
  modified_base 10: mod_base = OTHER; note = 2'-O-methyladenosine-3'-phosphate
  modified_base 11: mod_base = OTHER; note = 2'-O-methyluridine-3'-phosphate
  modified_base 12: mod_base = OTHER; note = 2'-O-methyladenosine-3'-phosphate
  modified_base 13: mod_base = OTHER; note = 2'-O-methylguanosine-3'-phosphate
  modified_base 14: mod_base = OTHER; note = 2'-deoxy-2'-fluoroadenosine-3'-phosphate
  modified_base 15: mod_base = OTHER; note = 2'-O-methylguanosine-3'-phosphate
  modified_base 16: mod_base = OTHER; note = 2'-deoxy-2'-fluorocytidine-3'-phosphate
  modified_base 17: mod_base = OTHER; note = 2'-O-methyladenosine-3'-phosphate
  modified_base 18: mod_base = OTHER; note = 2'-O-methyladenosine-3'-phosphate
  modified_base 19: mod_base = OTHER; note = 2'-O-methylguanosine-3'-phosphate
  modified_base 20: mod_base = OTHER; note = 2'-O-methyladenosine-3'-phosphate
  modified_base 21: mod_base = OTHER; note = 2'-O-methyladenosine-3'-phosphorothioate
  modified_base 22: mod_base = OTHER; note = 2'-O-methylcytidine-3'-phosphorothioate
  modified_base 23: mod_base = OTHER; note = 2'-O-methyladenosine
acacggtttatagagcaagaaca

SEQ ID NO: 405 - RNA, 23 nt, synthetic construct
  source 1..23: mol_type = other RNA
  modified_base 1: mod_base = OTHER; note = 2'-O-methyluridine-3'-phosphorothioate
  modified_base 2: mod_base = OTHER; note = 2'-deoxy-2'-fluoroguanosine-3'-phosphorothioate
  modified_base 3: mod_base = OTHER; note = 2'-O-methyluridine-3'-phosphate
  modified_base 4: mod_base = OTHER; note = 2'-O-methyluridine-3'-phosphate
  modified_base 5: mod_base = OTHER; note = 2'-O-methyluridine-3'-phosphate
  modified_base 6: mod_base = OTHER; note = 2'-O-methyladenosine-3'-phosphate
  modified_base 7: mod_base = OTHER; note = 2'-O-methyluridine-3'-phosphate
  modified_base 8: mod_base = OTHER; note = 2'-O-methyladenosine-3'-phosphate
  modified_base 9: mod_base = OTHER; note = 2'-O-methylguanosine-3'-phosphate
  modified_base 10: mod_base = OTHER; note = 2'-O-methyladenosine-3'-phosphate
  modified_base 11: mod_base = OTHER; note = 2'-O-methylguanosine-3'-phosphate
  modified_base 12: mod_base = OTHER; note = 2'-O-methylcytidine-3'-phosphate
  modified_base 13: mod_base = OTHER; note = 2'-O-methyladenosine-3'-phosphate
  modified_base 14: mod_base = OTHER; note = 2'-deoxy-2'-fluoroadenosine-3'-phosphate
  modified_base 15: mod_base = OTHER; note = 2'-O-methylguanosine-3'-phosphate
  modified_base 16: mod_base = OTHER; note = 2'-deoxy-2'-fluoroadenosine-3'-phosphate
  modified_base 17: mod_base = OTHER; note = 2'-O-methyladenosine-3'-phosphate
  modified_base 18: mod_base = OTHER; note = 2'-O-methylcytidine-3'-phosphate
  modified_base 19: mod_base = OTHER; note = 2'-O-methyladenosine-3'-phosphate
  modified_base 20: mod_base = OTHER; note = 2'-O-methylcytidine-3'-phosphate
  modified_base 21: mod_base = OTHER; note = 2'-O-methyluridine-3'-phosphorothioate
  modified_base 22: mod_base = OTHER; note = 2'-O-methylguanosine-3'-phosphorothioate
  modified_base 23: mod_base = OTHER; note = 2'-O-methyluridine
tgtttatagagcaagaacactgt

SEQ ID NO: 406 - RNA, 23 nt, synthetic construct
  source 1..23: mol_type = other RNA
  modified_base 1: mod_base = OTHER; note = 2'-O-methyluridine-3'-phosphorothioate
  modified_base 2: mod_base = OTHER; note = 2'-deoxy-2'-fluoroguanosine-3'-phosphorothioate
  modified_base 3: mod_base = OTHER; note = 2'-O-methyluridine-3'-phosphate
  modified_base 4: mod_base = OTHER; note = 2'-O-methyluridine-3'-phosphate
  modified_base 5: mod_base = OTHER; note 2-(1R-(uracil-1-yl)-2-hydroxyethoxy)-(2R,3R)-1,3-dihydroxyb utane 3-phosphate
  modified_base 6: mod_base = OTHER; note = 2'-O-methyladenosine-3'-phosphate
  modified_base 7: mod_base = OTHER; note = 2'-O-methyluridine-3'-phosphate
  modified_base 8: mod_base = OTHER; note = 2'-O-methyladenosine-3'-phosphate
  modified_base 9: mod_base = OTHER; note = 2'-O-methylguanosine-3'-phosphate
  modified_base 10: mod_base = OTHER; note = 2'-O-methyladenosine-3'-phosphate
  modified_base 11: mod_base = OTHER; note = 2'-O-methylguanosine-3'-phosphate
  modified_base 12: mod_base = OTHER; note = 2'-O-methylcytidine-3'-phosphate
  modified_base 13: mod_base = OTHER; note = 2'-O-methyladenosine-3'-phosphate
  modified_base 14: mod_base = OTHER; note = 2'-deoxy-2'-fluoroadenosine-3'-phosphate
  modified_base 15: mod_base = OTHER; note = 2'-O-methylguanosine-3'-phosphate
  modified_base 16: mod_base = OTHER; note = 2'-deoxy-2'-fluoroadenosine-3'-phosphate
  modified_base 17: mod_base = OTHER; note = 2'-O-methyladenosine-3'-phosphate
  modified_base 18: mod_base = OTHER; note = 2'-O-methylcytidine-3'-phosphate
  modified_base 19: mod_base = OTHER; note = 2'-O-methyladenosine-3'-phosphate
  modified_base 20: mod_base = OTHER; note = 2'-O-methylcytidine-3'-phosphate
  modified_base 21: mod_base = OTHER; note = 2'-O-methyluridine-3'-phosphorothioate
  modified_base 22: mod_base = OTHER; note = 2'-O-methylguanosine-3'-phosphorothioate
  modified_base 23: mod_base = OTHER; note = 2'-O-methyluridine
tgtttatagagcaagaacactgt

SEQ ID NO: 407 - RNA, 23 nt, synthetic construct
  source 1..23: mol_type = other RNA
  modified_base 1: mod_base = OTHER; note = 2'-O-methyluridine-3'-phosphorothioate
  modified_base 2: mod_base = OTHER; note = 2'-deoxy-2'-fluoroguanosine-3'-phosphorothioate
  modified_base 3: mod_base = OTHER; note = 2'-O-methyluridine-3'-phosphate
  modified_base 4: mod_base = OTHER; note = 2'-O-methyluridine-3'-phosphate
  modified_base 5: mod_base = OTHER; note = 2'-O-methyluridine-3'-phosphate
  modified_base 6: mod_base = OTHER; note = 2'-O-methyladenosine-3'-phosphate
  modified_base 7: mod_base = OTHER; note 2-(1R-(uracil-1-yl)-2-hydroxyethoxy)-(2R,3S)-1,3-dihydroxyb utane 3-phosphate
  modified_base 8: mod_base = OTHER; note = 2'-O-methyladenosine-3'-phosphate
  modified_base 9: mod_base = OTHER; note = 2'-O-methylguanosine-3'-phosphate
  modified_base 10: mod_base = OTHER; note = 2'-O-methyladenosine-3'-phosphate
  modified_base 11: mod_base = OTHER; note = 2'-O-methylguanosine-3'-phosphate
  modified_base 12: mod_base = OTHER; note = 2'-O-methylcytidine-3'-phosphate
  modified_base 13: mod_base = OTHER; note = 2'-O-methyladenosine-3'-phosphate
  modified_base 14: mod_base = OTHER; note = 2'-deoxy-2'-fluoroadenosine-3'-phosphate
  modified_base 15: mod_base = OTHER; note = 2'-O-methylguanosine-3'-phosphate
  modified_base 16: mod_base = OTHER; note = 2'-deoxy-2'-fluoroadenosine-3'-phosphate
  modified_base 17: mod_base = OTHER; note = 2'-O-methyladenosine-3'-phosphate
  modified_base 18: mod_base = OTHER; note = 2'-O-methylcytidine-3'-phosphate
  modified_base 19: mod_base = OTHER; note = 2'-O-methyladenosine-3'-phosphate
  modified_base 20: mod_base = OTHER; note = 2'-O-methylcytidine-3'-phosphate
  modified_base 21: mod_base = OTHER; note = 2'-O-methyluridine-3'-phosphorothioate
  modified_base 22: mod_base = OTHER; note = 2'-O-methylguanosine-3'-phosphorothioate
  modified_base 23: mod_base = OTHER; note = 2'-O-methyluridine
tgtttatagagcaagaacactgt

SEQ ID NO: 408 - RNA, 23 nt, synthetic construct
  source 1..23: mol_type = other RNA
  modified_base 1: mod_base = OTHER; note = 2'-O-methyladenosine-3'-phosphorothioate
  modified_base 2: mod_base = OTHER; note = 2'-deoxy-2'-fluorocytidine-3'-phosphorothioate
  modified_base 3: mod_base = OTHER; note = 2'-O-methyladenosine-3'-phosphate
  modified_base 4: mod_base = OTHER; note = 2'-O-methylcytidine-3'-phosphate
  modified_base 5: mod_base = OTHER; note = 2'-O-methylguanosine-3'-phosphate
  modified_base 6: mod_base = OTHER; note = 2'-O-methylguanosine-3'-phosphate
  modified_base 7: mod_base = OTHER; note 2-(1R-(uracil-1-yl)-2-hydroxyethoxy)-1,3-(2S,3S)-dihydroxyb utane 1-phosphate
  modified_base 8: mod_base = OTHER; note = 2'-O-methyluridine-3'-phosphate
  modified_base 9: mod_base = OTHER; note = 2'-O-methyluridine-3'-phosphate
  modified_base 10: mod_base = OTHER; note = 2'-O-methyladenosine-3'-phosphate
  modified_base 11: mod_base = OTHER; note = 2'-O-methyluridine-3'-phosphate
  modified_base 12: mod_base = OTHER; note = 2'-O-methyladenosine-3'-phosphate
  modified_base 13: mod_base = OTHER; note = 2'-O-methylguanosine-3'-phosphate
  modified_base 14: mod_base = OTHER; note = 2'-deoxy-2'-fluoroadenosine-3'-phosphate
  modified_base 15: mod_base = OTHER; note = 2'-O-methylguanosine-3'-phosphate
  modified_base 16: mod_base = OTHER; note = 2'-deoxy-2'-fluorocytidine-3'-phosphate
  modified_base 17: mod_base = OTHER; note = 2'-O-methyladenosine-3'-phosphate
  modified_base 18: mod_base = OTHER; note = 2'-O-methyladenosine-3'-phosphate
  modified_base 19: mod_base = OTHER; note = 2'-O-methylguanosine-3'-phosphate
  modified_base 20: mod_base = OTHER; note = 2'-O-methyladenosine-3'-phosphate
  modified_base 21: mod_base = OTHER; note = 2'-O-methyladenosine-3'-phosphorothioate
  modified_base 22: mod_base = OTHER; note = 2'-O-methylcytidine-3'-phosphorothioate
  modified_base 23: mod_base = OTHER; note = 2'-O-methyladenosine
acacggtttatagagcaagaaca

SEQ ID NO: 409 - RNA, 23 nt, synthetic construct
  source 1..23: mol_type = other RNA
  modified_base 1: mod_base = OTHER; note = 2'-O-methyluridine-3'-phosphorothioate
  modified_base 2: mod_base = OTHER; note = 2'-deoxy-2'-fluoroguanosine-3'-phosphorothioate
  modified_base 3: mod_base = OTHER; note = 2'-O-methyluridine-3'-phosphate
  modified_base 4: mod_base = OTHER; note = 2'-O-methyluridine-3'-phosphate
  modified_base 5: mod_base = OTHER; note = Thymidine-glycol nucleic acid (GNA), S-Isomer
  modified_base 6: mod_base = OTHER; note = 2'-O-methyladenosine-3'-phosphate
  modified_base 7: mod_base = OTHER; note = 2'-O-methyluridine-3'-phosphate
  modified_base 8: mod_base = OTHER; note = 2'-O-methyladenosine-3'-phosphate
  modified_base 9: mod_base = OTHER; note = 2'-O-methylguanosine-3'-phosphate
  modified_base 10: mod_base = OTHER; note = 2'-O-methyladenosine-3'-phosphate
  modified_base 11: mod_base = OTHER; note = 2'-O-methylguanosine-3'-phosphate
  modified_base 12: mod_base = OTHER; note = 2'-O-methylcytidine-3'-phosphate
  modified_base 13: mod_base = OTHER; note = 2'-O-methyladenosine-3'-phosphate
  modified_base 14: mod_base = OTHER; note = 2'-deoxy-2'-fluoroadenosine-3'-phosphate
  modified_base 15: mod_base = OTHER; note = 2'-O-methylguanosine-3'-phosphate
  modified_base 16: mod_base = OTHER; note = 2'-deoxy-2'-fluoroadenosine-3'-phosphate
  modified_base 17: mod_base = OTHER; note = 2'-O-methyladenosine-3'-phosphate
  modified_base 18: mod_base = OTHER; note = 2'-O-methylcytidine-3'-phosphate
  modified_base 19: mod_base = OTHER; note = 2'-O-methyladenosine-3'-phosphate
  modified_base 20: mod_base = OTHER; note = 2'-O-methylcytidine-3'-phosphate
  modified_base 21: mod_base = OTHER; note = 2'-O-methyluridine-3'-phosphorothioate
  modified_base 22: mod_base = OTHER; note = 2'-O-methylguanosine-3'-phosphorothioate
  modified_base 23: mod_base = OTHER; note = 2'-O-methyluridine
tgtttatagagcaagaacactgt

SEQ ID NO: 410 - RNA, 23 nt, synthetic construct
  source 1..23: mol_type = other RNA
  modified_base 1: mod_base = OTHER; note = 2'-O-methyluridine-3'-phosphorothioate
  modified_base 2: mod_base = OTHER; note = 2'-deoxy-2'-fluoroguanosine-3'-phosphorothioate
  modified_base 3: mod_base = OTHER; note = 2'-O-methyluridine-3'-phosphate
  modified_base 4: mod_base = OTHER; note = 2'-O-methyluridine-3'-phosphate
  modified_base 5: mod_base = OTHER; note 2-(1R-(uracil-1-yl)-2-hydroxyethoxy)-1,3-dihydroxy-2-methox ypropane 1-phosphate
  modified_base 6: mod_base = OTHER; note = 2'-O-methyladenosine-3'-phosphate
  modified_base 7: mod_base = OTHER; note = 2'-O-methyluridine-3'-phosphate
  modified_base 8: mod_base = OTHER; note = 2'-O-methyladenosine-3'-phosphate
  modified_base 9: mod_base = OTHER; note = 2'-O-methylguanosine-3'-phosphate
  modified_base 10: mod_base = OTHER; note = 2'-O-methyladenosine-3'-phosphate
  modified_base 11: mod_base = OTHER; note = 2'-O-methylguanosine-3'-phosphate
  modified_base 12: mod_base = OTHER; note = 2'-O-methylcytidine-3'-phosphate
  modified_base 13: mod_base = OTHER; note = 2'-O-methyladenosine-3'-phosphate
  modified_base 14: mod_base = OTHER; note = 2'-deoxy-2'-fluoroadenosine-3'-phosphate
  modified_base 15: mod_base = OTHER; note = 2'-O-methylguanosine-3'-phosphate
  modified_base 16: mod_base = OTHER; note = 2'-deoxy-2'-fluoroadenosine-3'-phosphate
  modified_base 17: mod_base = OTHER; note = 2'-O-methyladenosine-3'-phosphate
  modified_base 18: mod_base = OTHER; note = 2'-O-methylcytidine-3'-phosphate
  modified_base 19: mod_base = OTHER; note = 2'-O-methyladenosine-3'-phosphate
  modified_base 20: mod_base = OTHER; note = 2'-O-methylcytidine-3'-phosphate
  modified_base 21: mod_base = OTHER; note = 2'-O-methyluridine-3'-phosphorothioate
  modified_base 22: mod_base = OTHER; note = 2'-O-methylguanosine-3'-phosphorothioate
  modified_base 23: mod_base = OTHER; note = 2'-O-methyluridine
tgtttatagagcaagaacactgt

SEQ ID NO: 411 - RNA, 23 nt, synthetic construct
  source 1..23: mol_type = other RNA
  modified_base 1: mod_base = OTHER; note = 2'-O-methyluridine-3'-phosphorothioate
  modified_base 2: mod_base = OTHER; note = 2'-deoxy-2'-fluoroguanosine-3'-phosphorothioate
  modified_base 3: mod_base = OTHER; note = 2'-O-methyluridine-3'-phosphate
  modified_base 4: mod_base = OTHER; note = 2'-O-methyluridine-3'-phosphate
  modified_base 5: mod_base = OTHER; note = 2'-O-methyluridine-3'-phosphate
  modified_base 6: mod_base = OTHER; note = 2'-O-methyladenosine-3'-phosphate
  modified_base 7: mod_base = OTHER; note 2-(1R-(uracil-1-yl)-2-hydroxyethoxy)-(2R,3R)-1,3-dihydroxyb utane 3-phosphate
  modified_base 8: mod_base = OTHER; note = 2'-O-methyladenosine-3'-phosphate
  modified_base 9: mod_base = OTHER; note = 2'-O-methylguanosine-3'-phosphate
  modified_base 10: mod_base = OTHER; note = 2'-O-methyladenosine-3'-phosphate
  modified_base 11: mod_base = OTHER; note = 2'-O-methylguanosine-3'-phosphate
  modified_base 12: mod_base = OTHER; note = 2'-O-methylcytidine-3'-phosphate
  modified_base 13: mod_base = OTHER; note = 2'-O-methyladenosine-3'-phosphate
  modified_base 14: mod_base = OTHER; note = 2'-deoxy-2'-fluoroadenosine-3'-phosphate
  modified_base 15: mod_base = OTHER; note = 2'-O-methylguanosine-3'-phosphate
  modified_base 16: mod_base = OTHER; note = 2'-deoxy-2'-fluoroadenosine-3'-phosphate
  modified_base 17: mod_base = OTHER; note = 2'-O-methyladenosine-3'-phosphate
  modified_base 18: mod_base = OTHER; note = 2'-O-methylcytidine-3'-phosphate
  modified_base 19: mod_base = OTHER; note = 2'-O-methyladenosine-3'-phosphate
  modified_base 20: mod_base = OTHER; note = 2'-O-methylcytidine-3'-phosphate
  modified_base 21: mod_base = OTHER; note = 2'-O-methyluridine-3'-phosphorothioate
  modified_base 22: mod_base = OTHER; note = 2'-O-methylguanosine-3'-phosphorothioate
  modified_base 23: mod_base = OTHER; note = 2'-O-methyluridine
tgtttatagagcaagaacactgt

SEQ ID NO: 412 - RNA, 23 nt, synthetic construct
  source 1..23: mol_type = other RNA
  modified_base 1: mod_base = OTHER; note = 2'-O-methyladenosine-3'-phosphorothioate
  modified_base 2: mod_base = OTHER; note = 2'-deoxy-2'-fluorocytidine-3'-phosphorothioate
  modified_base 3: mod_base = OTHER; note = 2'-O-methyladenosine-3'-phosphate
  modified_base 4: mod_base = OTHER; note = 2'-O-methylcytidine-3'-phosphate
  modified_base 5: mod_base = OTHER; note = 2'-O-methylguanosine-3'-phosphate
  modified_base 6: mod_base = OTHER; note = 2'-O-methylguanosine-3'-phosphate
  modified_base 7: mod_base = OTHER; note 2-(1R-(uracil-1-yl)-2-hydroxyethoxy)-1,3-(2S,3R)-dihydroxyb utane 1-phosphate
  modified_base 8: mod_base = OTHER; note = 2'-O-methyluridine-3'-phosphate
  modified_base 9: mod_base = OTHER; note = 2'-O-methyluridine-3'-phosphate
  modified_base 10: mod_base = OTHER; note = 2'-O-methyladenosine-3'-phosphate
  modified_base 11: mod_base = OTHER; note = 2'-O-methyluridine-3'-phosphate
  modified_base 12: mod_base = OTHER; note = 2'-O-methyladenosine-3'-phosphate
  modified_base 13: mod_base = OTHER; note = 2'-O-methylguanosine-3'-phosphate
  modified_base 14: mod_base = OTHER; note = 2'-deoxy-2'-fluoroadenosine-3'-phosphate
  modified_base 15: mod_base = OTHER; note = 2'-O-methylguanosine-3'-phosphate
  modified_base 16: mod_base = OTHER; note = 2'-deoxy-2'-fluorocytidine-3'-phosphate
  modified_base 17: mod_base = OTHER; note = 2'-O-methyladenosine-3'-phosphate
  modified_base 18: mod_base = OTHER; note = 2'-O-methyladenosine-3'-phosphate
  modified_base 19: mod_base = OTHER; note = 2'-O-methylguanosine-3'-phosphate
  modified_base 20: mod_base = OTHER; note = 2'-O-methyladenosine-3'-phosphate
  modified_base 21: mod_base = OTHER; note = 2'-O-methyladenosine-3'-phosphorothioate
  modified_base 22: mod_base = OTHER; note = 2'-O-methylcytidine-3'-phosphorothioate
  modified_base 23: mod_base = OTHER; note = 2'-O-methyladenosine
acacggtttatagagcaagaaca

SEQ ID NO: 413 - RNA, 23 nt, synthetic construct
  source 1..23: mol_type = other RNA
  modified_base 1: mod_base = OTHER; note = 2'-O-methyluridine-3'-phosphorothioate
  modified_base 2: mod_base = OTHER; note = 2'-deoxy-2'-fluoroguanosine-3'-phosphorothioate
  modified_base 3: mod_base = OTHER; note = 2'-O-methyluridine-3'-phosphate
  modified_base 4: mod_base = OTHER; note = 2'-O-methyluridine-3'-phosphate
  modified_base 5: mod_base = OTHER; note 2-(1R-(uracil-1-yl)-2-hydroxyethoxy)-1,3-dihydroxypropane 3-phosphate
  modified_base 6: mod_base = OTHER; note = 2'-O-methyladenosine-3'-phosphate
  modified_base 7: mod_base = OTHER; note = 2'-O-methyluridine-3'-phosphate
  modified_base 8: mod_base = OTHER; note = 2'-O-methyladenosine-3'-phosphate
  modified_base 9: mod_base = OTHER; note = 2'-O-methylguanosine-3'-phosphate
  modified_base 10: mod_base = OTHER; note = 2'-O-methyladenosine-3'-phosphate
  modified_base 11: mod_base = OTHER; note = 2'-O-methylguanosine-3'-phosphate
  modified_base 12: mod_base = OTHER; note = 2'-O-methylcytidine-3'-phosphate
  modified_base 13: mod_base = OTHER; note = 2'-O-methyladenosine-3'-phosphate
  modified_base 14: mod_base = OTHER; note = 2'-deoxy-2'-fluoroadenosine-3'-phosphate
  modified_base 15: mod_base = OTHER; note = 2'-O-methylguanosine-3'-phosphate
  modified_base 16: mod_base = OTHER; note = 2'-deoxy-2'-fluoroadenosine-3'-phosphate
  modified_base 17: mod_base = OTHER; note = 2'-O-methyladenosine-3'-phosphate
  modified_base 18: mod_base = OTHER; note = 2'-O-methylcytidine-3'-phosphate
  modified_base 19: mod_base = OTHER; note = 2'-O-methyladenosine-3'-phosphate
  modified_base 20: mod_base = OTHER; note = 2'-O-methylcytidine-3'-phosphate
  modified_base 21: mod_base = OTHER; note = 2'-O-methyluridine-3'-phosphorothioate
  modified_base 22: mod_base = OTHER; note = 2'-O-methylguanosine-3'-phosphorothioate
  modified_base 23: mod_base = OTHER; note = 2'-O-methyluridine
tgtttatagagcaagaacactgt

SEQ ID NO: 414 - RNA, 23 nt, synthetic construct
  source 1..23: mol_type = other RNA
  modified_base 1: mod_base = OTHER; note = 2'-O-methyluridine-3'-phosphorothioate
  modified_base 2: mod_base = OTHER; note = 2'-deoxy-2'-fluoroguanosine-3'-phosphorothioate
  modified_base 3: mod_base = OTHER; note = 2'-O-methyluridine-3'-phosphate
  modified_base 4: mod_base = OTHER; note = 2'-O-methyluridine-3'-phosphate
  modified_base 5: mod_base = OTHER; note = 2'-O-methyluridine-3'-phosphate
  modified_base 6: mod_base = OTHER; note = 2'-O-methyladenosine-3'-phosphate
  modified_base 7: mod_base = OTHER; note = Thymidine-glycol nucleic acid (GNA), S-Isomer
  modified_base 8: mod_base = OTHER; note = 2'-O-methyladenosine-3'-phosphate
  modified_base 9: mod_base = OTHER; note = 2'-O-methylguanosine-3'-phosphate
  modified_base 10: mod_base = OTHER; note = 2'-O-methyladenosine-3'-phosphate
  modified_base 11: mod_base = OTHER; note = 2'-O-methylguanosine-3'-phosphate
  modified_base 12: mod_base = OTHER; note = 2'-O-methylcytidine-3'-phosphate
  modified_base 13: mod_base = OTHER; note = 2'-O-methyladenosine-3'-phosphate
  modified_base 14: mod_base = OTHER; note = 2'-deoxy-2'-fluoroadenosine-3'-phosphate
  modified_base 15: mod_base = OTHER; note = 2'-O-methylguanosine-3'-phosphate
  modified_base 16: mod_base = OTHER; note = 2'-deoxy-2'-fluoroadenosine-3'-phosphate
  modified_base 17: mod_base = OTHER; note = 2'-O-methyladenosine-3'-phosphate
  modified_base 18: mod_base = OTHER; note = 2'-O-methylcytidine-3'-phosphate
  modified_base 19: mod_base = OTHER; note = 2'-O-methyladenosine-3'-phosphate
  modified_base 20: mod_base = OTHER; note = 2'-O-methylcytidine-3'-phosphate
  modified_base 21: mod_base = OTHER; note = 2'-O-methyluridine-3'-phosphorothioate
  modified_base 22: mod_base = OTHER; note = 2'-O-methylguanosine-3'-phosphorothioate
  modified_base 23: mod_base = OTHER; note = 2'-O-methyluridine
tgtttatagagcaagaacactgt

SEQ ID NO: 415 - RNA, 23 nt, synthetic construct
  source 1..23: mol_type = other RNA
  modified_base 1: mod_base = OTHER; note = 2'-O-methyluridine-3'-phosphorothioate
  modified_base 2: mod_base = OTHER; note = 2'-deoxy-2'-fluoroguanosine-3'-phosphorothioate
  modified_base 3: mod_base = OTHER; note = 2'-O-methyluridine-3'-phosphate
  modified_base 4: mod_base = OTHER; note = 2'-O-methyluridine-3'-phosphate
  modified_base 5: mod_base = OTHER; note = 2'-O-methyluridine-3'-phosphate
  modified_base 6: mod_base = OTHER; note = 2'-O-methyladenosine-3'-phosphate
  modified_base 7: mod_base = OTHER; note 2-(1R-(uracil-1-yl)-2-hydroxyethoxy)-1,3-dihydroxy-2-methox ypropane 1-phosphate
  modified_base 8: mod_base = OTHER; note = 2'-O-methyladenosine-3'-phosphate
  modified_base 9: mod_base = OTHER; note = 2'-O-methylguanosine-3'-phosphate
  modified_base 10: mod_base = OTHER; note = 2'-O-methyladenosine-3'-phosphate
  modified_base 11: mod_base = OTHER; note = 2'-O-methylguanosine-3'-phosphate
  modified_base 12: mod_base = OTHER; note = 2'-O-methylcytidine-3'-phosphate
  modified_base 13: mod_base = OTHER; note = 2'-O-methyladenosine-3'-phosphate
  modified_base 14: mod_base = OTHER; note = 2'-deoxy-2'-fluoroadenosine-3'-phosphate
  modified_base 15: mod_base = OTHER; note = 2'-O-methylguanosine-3'-phosphate
  modified_base 16: mod_base = OTHER; note = 2'-deoxy-2'-fluoroadenosine-3'-phosphate
  modified_base 17: mod_base = OTHER; note = 2'-O-methyladenosine-3'-phosphate
  modified_base 18: mod_base = OTHER; note = 2'-O-methylcytidine-3'-phosphate
  modified_base 19: mod_base = OTHER; note = 2'-O-methyladenosine-3'-phosphate
  modified_base 20: mod_base = OTHER; note = 2'-O-methylcytidine-3'-phosphate
  modified_base 21: mod_base = OTHER; note = 2'-O-methyluridine-3'-phosphorothioate
  modified_base 22: mod_base = OTHER; note = 2'-O-methylguanosine-3'-phosphorothioate
  modified_base 23: mod_base = OTHER; note = 2'-O-methyluridine
tgtttatagagcaagaacactgt

SEQ ID NO: 416 - RNA, 23 nt, synthetic construct
  source 1..23: mol_type = other RNA
  modified_base 1: mod_base = OTHER; note = 2'-O-methyladenosine-3'-phosphorothioate
  modified_base 2: mod_base = OTHER; note = 2'-deoxy-2'-fluorocytidine-3'-phosphorothioate
  modified_base 3: mod_base = OTHER; note = 2'-O-methyladenosine-3'-phosphate
  modified_base 4: mod_base = OTHER; note = 2'-O-methylcytidine-3'-phosphate
  modified_base 5: mod_base = OTHER; note = 2'-O-methylguanosine-3'-phosphate
  modified_base 6: mod_base = OTHER; note = 2'-O-methylguanosine-3'-phosphate
  modified_base 7: mod_base = OTHER; note 2-(1R-(uracil-1-yl)-2S-hydroxypropoxy)-1,3-dihydroxybutane 1-phosphate
  modified_base 8: mod_base = OTHER; note = 2'-O-methyluridine-3'-phosphate
  modified_base 9: mod_base = OTHER; note = 2'-O-methyluridine-3'-phosphate
  modified_base 10: mod_base = OTHER; note = 2'-O-methyladenosine-3'-phosphate
  modified_base 11: mod_base = OTHER; note = 2'-O-methyluridine-3'-phosphate
  modified_base 12: mod_base = OTHER; note = 2'-O-methyladenosine-3'-phosphate
  modified_base 13: mod_base = OTHER; note = 2'-O-methylguanosine-3'-phosphate
  modified_base 14: mod_base = OTHER; note = 2'-deoxy-2'-fluoroadenosine-3'-phosphate
  modified_base 15: mod_base = OTHER; note = 2'-O-methylguanosine-3'-phosphate
  modified_base 16: mod_base = OTHER; note = 2'-deoxy-2'-fluorocytidine-3'-phosphate
  modified_base 17: mod_base = OTHER; note = 2'-O-methyladenosine-3'-phosphate
  modified_base 18: mod_base = OTHER; note = 2'-O-methyladenosine-3'-phosphate
  modified_base 19: mod_base = OTHER; note = 2'-O-methylguanosine-3'-phosphate
  modified_base 20: mod_base = OTHER; note = 2'-O-methyladenosine-3'-phosphate
  modified_base 21: mod_base = OTHER; note = 2'-O-methyladenosine-3'-phosphorothioate
  modified_base 22: mod_base = OTHER; note = 2'-O-methylcytidine-3'-phosphorothioate
  modified_base 23: mod_base = OTHER; note = 2'-O-methyladenosine
acacggtttatagagcaagaaca

SEQ ID NO: 417 - RNA, 23 nt, synthetic construct
  source 1..23: mol_type = other RNA
  modified_base 1: mod_base = OTHER; note = 2'-O-methyluridine-3'-phosphorothioate
  modified_base 2: mod_base = OTHER; note = 2'-deoxy-2'-fluoroguanosine-3'-phosphorothioate
  modified_base 3: mod_base = OTHER; note = 2'-O-methyluridine-3'-phosphate
  modified_base 4: mod_base = OTHER; note = 2'-O-methyluridine-3'-phosphate
  modified_base 5: mod_base = OTHER; note 2-(1R-(uracil-1-yl)-2-hydroxyethoxy)-1,3-(2S,3S)-dihydroxyb utane 1-phosphate
  modified_base 6: mod_base = OTHER; note = 2'-O-methyladenosine-3'-phosphate
  modified_base 7: mod_base = OTHER; note = 2'-O-methyluridine-3'-phosphate
  modified_base 8: mod_base = OTHER; note = 2'-O-methyladenosine-3'-phosphate
  modified_base 9: mod_base = OTHER; note = 2'-O-methylguanosine-3'-phosphate
  modified_base 10: mod_base = OTHER; note = 2'-O-methyladenosine-3'-phosphate
  modified_base 11: mod_base = OTHER; note = 2'-O-methylguanosine-3'-phosphate
  modified_base 12: mod_base = OTHER; note = 2'-O-methylcytidine-3'-phosphate
  modified_base 13: mod_base = OTHER; note = 2'-O-methyladenosine-3'-phosphate
  modified_base 14: mod_base = OTHER; note = 2'-deoxy-2'-fluoroadenosine-3'-phosphate
  modified_base 15: mod_base = OTHER; note = 2'-O-methylguanosine-3'-phosphate
  modified_base 16: mod_base = OTHER; note = 2'-deoxy-2'-fluoroadenosine-3'-phosphate
  modified_base 17: mod_base = OTHER; note = 2'-O-methyladenosine-3'-phosphate
  modified_base 18: mod_base = OTHER; note = 2'-O-methylcytidine-3'-phosphate
  modified_base 19: mod_base = OTHER; note = 2'-O-methyladenosine-3'-phosphate
  modified_base 20: mod_base = OTHER; note = 2'-O-methylcytidine-3'-phosphate
  modified_base 21: mod_base = OTHER; note = 2'-O-methyluridine-3'-phosphorothioate
  modified_base 22: mod_base = OTHER; note = 2'-O-methylguanosine-3'-phosphorothioate
  modified_base 23: mod_base = OTHER; note = 2'-O-methyluridine
tgtttatagagcaagaacactgt

SEQ ID NO: 418 - RNA, 23 nt, synthetic construct
  source 1..23: mol_type = other RNA
  modified_base 1: mod_base = OTHER; note = 2'-O-methyluridine-3'-phosphorothioate
  modified_base 2: mod_base = OTHER; note = 2'-deoxy-2'-fluoroguanosine-3'-phosphorothioate
  modified_base 3: mod_base = OTHER; note = 2'-O-methyluridine-3'-phosphate
  modified_base 4: mod_base = OTHER; note = 2'-O-methyluridine-3'-phosphate
  modified_base 5: mod_base = OTHER; note = 2'-O-methyluridine-3'-phosphate
  modified_base 6: mod_base = OTHER; note = 2'-O-methyladenosine-3'-phosphate
  modified_base 7: mod_base = OTHER; note 2-(1R-(uracil-1-yl)-2-hydroxyethoxy)-1,3-dihydroxypropane 3-phosphate
  modified_base 8: mod_base = OTHER; note = 2'-O-methyladenosine-3'-phosphate
  modified_base 9: mod_base = OTHER; note = 2'-O-methylguanosine-3'-phosphate
  modified_base 10: mod_base = OTHER; note = 2'-O-methyladenosine-3'-phosphate
  modified_base 11: mod_base = OTHER; note = 2'-O-methylguanosine-3'-phosphate
  modified_base 12: mod_base = OTHER; note = 2'-O-methylcytidine-3'-phosphate
  modified_base 13: mod_base = OTHER; note = 2'-O-methyladenosine-3'-phosphate
  modified_base 14: mod_base = OTHER; note = 2'-deoxy-2'-fluoroadenosine-3'-phosphate
  modified_base 15: mod_base = OTHER; note = 2'-O-methylguanosine-3'-phosphate
  modified_base 16: mod_base = OTHER; note = 2'-deoxy-2'-fluoroadenosine-3'-phosphate
  modified_base 17: mod_base = OTHER; note = 2'-O-methyladenosine-3'-phosphate
  modified_base 18: mod_base = OTHER; note = 2'-O-methylcytidine-3'-phosphate
  modified_base 19: mod_base = OTHER; note = 2'-O-methyladenosine-3'-phosphate
  modified_base 20: mod_base = OTHER; note = 2'-O-methylcytidine-3'-phosphate
  modified_base 21: mod_base = OTHER; note = 2'-O-methyluridine-3'-phosphorothioate
  modified_base 22: mod_base = OTHER; note = 2'-O-methylguanosine-3'-phosphorothioate
  modified_base 23: mod_base = OTHER; note = 2'-O-methyluridine
tgtttatagagcaagaacactgt

SEQ ID NO: 419 - RNA, 23 nt, synthetic construct
  source 1..23: mol_type = other RNA
  modified_base 1: mod_base = OTHER; note = 2'-O-methyladenosine-3'-phosphorothioate
  modified_base 2: mod_base = OTHER; note = 2'-deoxy-2'-fluorocytidine-3'-phosphorothioate
  modified_base 3: mod_base = OTHER; note = 2'-O-methyladenosine-3'-phosphate
  modified_base 4: mod_base = OTHER; note = 2'-O-methylcytidine-3'-phosphate
  modified_base 5: mod_base = OTHER; note = 2'-O-methylguanosine-3'-phosphate
  modified_base 6: mod_base = OTHER; note = 2'-O-methylguanosine-3'-phosphate
  modified_base 7: mod_base = OTHER; note 2-(1R-(uracil-1-yl)-2R-hydroxypropoxy)-1,3-dihydroxybutane 1-phosphate
  modified_base 8: mod_base = OTHER; note = 2'-O-methyluridine-3'-phosphate
  modified_base 9: mod_base = OTHER; note = 2'-O-methyluridine-3'-phosphate
  modified_base 10: mod_base = OTHER; note = 2'-O-methyladenosine-3'-phosphate
  modified_base 11: mod_base = OTHER; note = 2'-O-methyluridine-3'-phosphate
  modified_base 12: mod_base = OTHER; note = 2'-O-methyladenosine-3'-phosphate
  modified_base 13: mod_base = OTHER; note = 2'-O-methylguanosine-3'-phosphate
  modified_base 14: mod_base = OTHER; note = 2'-deoxy-2'-fluoroadenosine-3'-phosphate
  modified_base 15: mod_base = OTHER; note = 2'-O-methylguanosine-3'-phosphate
  modified_base 16: mod_base = OTHER; note = 2'-deoxy-2'-fluorocytidine-3'-phosphate
  modified_base 17: mod_base = OTHER; note = 2'-O-methyladenosine-3'-phosphate
  modified_base 18: mod_base = OTHER; note = 2'-O-methyladenosine-3'-phosphate
  modified_base 19: mod_base = OTHER; note = 2'-O-methylguanosine-3'-phosphate
  modified_base 20: mod_base = OTHER; note = 2'-O-methyladenosine-3'-phosphate
  modified_base 21: mod_base = OTHER; note = 2'-O-methyladenosine-3'-phosphorothioate
  modified_base 22: mod_base = OTHER; note = 2'-O-methylcytidine-3'-phosphorothioate
  modified_base 23: mod_base = OTHER; note = 2'-O-methyladenosine
acacggtttatagagcaagaaca

SEQ ID NO: 420 - RNA, 23 nt, synthetic construct
  source 1..23: mol_type = other RNA
  modified_base 1: mod_base = OTHER; note = 2'-O-methyluridine-3'-phosphorothioate
  modified_base 2: mod_base = OTHER; note = 2'-deoxy-2'-fluoroguanosine-3'-phosphorothioate
  modified_base 3: mod_base = OTHER; note = 2'-O-methyluridine-3'-phosphate
  modified_base 4: mod_base = OTHER; note = 2'-O-methyluridine-3'-phosphate
  modified_base 5: mod_base = OTHER; note 2-(1R-(uracil-1-yl)-2-hydroxyethoxy)-1,3-(2S,3R)-dihydroxyb utane 1-phosphate
  modified_base 6: mod_base = OTHER; note = 2'-O-methyladenosine-3'-phosphate
  modified_base 7: mod_base = OTHER; note = 2'-O-methyluridine-3'-phosphate
  modified_base 8: mod_base = OTHER; note = 2'-O-methyladenosine-3'-phosphate
  modified_base 9: mod_base = OTHER; note = 2'-O-methylguanosine-3'-phosphate
  modified_base 10: mod_base = OTHER; note = 2'-O-methyladenosine-3'-phosphate
  modified_base 11: mod_base = OTHER; note = 2'-O-methylguanosine-3'-phosphate
  modified_base 12: mod_base = OTHER; note = 2'-O-methylcytidine-3'-phosphate
  modified_base 13: mod_base = OTHER; note = 2'-O-methyladenosine-3'-phosphate
  modified_base 14: mod_base = OTHER; note = 2'-deoxy-2'-fluoroadenosine-3'-phosphate
  modified_base 15: mod_base = OTHER; note = 2'-O-methylguanosine-3'-phosphate
  modified_base 16: mod_base = OTHER; note = 2'-deoxy-2'-fluoroadenosine-3'-phosphate
  modified_base 17: mod_base = OTHER; note = 2'-O-methyladenosine-3'-phosphate
  modified_base 18: mod_base = OTHER; note = 2'-O-methylcytidine-3'-phosphate
  modified_base 19: mod_base = OTHER; note = 2'-O-methyladenosine-3'-phosphate
  modified_base 20: mod_base = OTHER; note = 2'-O-methylcytidine-3'-phosphate
  modified_base 21: mod_base = OTHER; note = 2'-O-methyluridine-3'-phosphorothioate
  modified_base 22: mod_base = OTHER; note = 2'-O-methylguanosine-3'-phosphorothioate
  modified_base 23: mod_base = OTHER; note = 2'-O-methyluridine
tgtttatagagcaagaacactgt

SEQ ID NO: 421 - RNA, 23 nt, synthetic construct
  source 1..23: mol_type = other RNA
  modified_base 1: mod_base = OTHER; note = 2'-O-methyluridine-3'-phosphorothioate
  modified_base 2: mod_base = OTHER; note = 2'-deoxy-2'-fluoroguanosine-3'-phosphorothioate
  modified_base 3: mod_base = OTHER; note = 2'-O-methyluridine-3'-phosphate
  modified_base 4: mod_base = OTHER; note = 2'-O-methyluridine-3'-phosphate
  modified_base 5: mod_base = OTHER; note = 2'-O-methyluridine-3'-phosphate
  modified_base 6: mod_base = OTHER; note = 2'-O-methyladenosine-3'-phosphate
  modified_base 7: mod_base = OTHER; note 2-(1R-(uracil-1-yl)-2-hydroxyethoxy)-1,3-(2S,3S)-dihydroxyb utane 1-phosphate
  modified_base 8: mod_base = OTHER; note = 2'-O-methyladenosine-3'-phosphate
  modified_base 9: mod_base = OTHER; note = 2'-O-methylguanosine-3'-phosphate
  modified_base 10: mod_base = OTHER; note = 2'-O-methyladenosine-3'-phosphate
  modified_base 11: mod_base = OTHER; note = 2'-O-methylguanosine-3'-phosphate
  modified_base 12: mod_base = OTHER; note = 2'-O-methylcytidine-3'-phosphate
  modified_base 13: mod_base = OTHER; note = 2'-O-methyladenosine-3'-phosphate
  modified_base 14: mod_base = OTHER; note = 2'-deoxy-2'-fluoroadenosine-3'-phosphate
  modified_base 15: mod_base = OTHER; note = 2'-O-methylguanosine-3'-phosphate
  modified_base 16: mod_base = OTHER; note = 2'-deoxy-2'-fluoroadenosine-3'-phosphate
  modified_base 17: mod_base = OTHER; note = 2'-O-methyladenosine-3'-phosphate
  modified_base 18: mod_base = OTHER; note = 2'-O-methylcytidine-3'-phosphate
  modified_base 19: mod_base = OTHER; note = 2'-O-methyladenosine-3'-phosphate
  modified_base 20: mod_base = OTHER; note = 2'-O-methylcytidine-3'-phosphate
  modified_base 21: mod_base = OTHER; note = 2'-O-methyluridine-3'-phosphorothioate
  modified_base 22: mod_base = OTHER; note = 2'-O-methylguanosine-3'-phosphorothioate
  modified_base 23: mod_base = OTHER; note = 2'-O-methyluridine
tgtttatagagcaagaacactgt

SEQ ID NO: 422 - RNA, 23 nt, synthetic construct
  source 1..23: mol_type = other RNA
  modified_base 1: mod_base = OTHER; note = 2'-O-methyladenosine-3'-phosphorothioate
  modified_base 2: mod_base = OTHER; note = 2'-deoxy-2'-fluorocytidine-3'-phosphorothioate
  modified_base 3: mod_base = OTHER; note = 2'-O-methyladenosine-3'-phosphate
  modified_base 4: mod_base = OTHER; note = 2'-O-methylcytidine-3'-phosphate
  modified_base 5: mod_base = OTHER; note = 2'-O-methylguanosine-3'-phosphate
  modified_base 6: mod_base = OTHER; note = 2'-O-methylguanosine-3'-phosphate
  modified_base 7: mod_base = OTHER; note 2-(1R-(uracil-1-yl)-2-hydroxyethoxy)-(2R,3S)-1,3-dihydroxyb utane 3-phosphate
  modified_base 8: mod_base = OTHER; note = 2'-O-methyluridine-3'-phosphate
  modified_base 9: mod_base = OTHER; note = 2'-O-methyluridine-3'-phosphate
  modified_base 10: mod_base = OTHER; note = 2'-O-methyladenosine-3'-phosphate
  modified_base 11: mod_base = OTHER; note = 2'-O-methyluridine-3'-phosphate
  modified_base 12: mod_base = OTHER; note = 2'-O-methyladenosine-3'-phosphate
  modified_base 13: mod_base = OTHER; note = 2'-O-methylguanosine-3'-phosphate
  modified_base 14: mod_base = OTHER; note = 2'-deoxy-2'-fluoroadenosine-3'-phosphate
  modified_base 15: mod_base = OTHER; note = 2'-O-methylguanosine-3'-phosphate
  modified_base 16: mod_base = OTHER; note = 2'-deoxy-2'-fluorocytidine-3'-phosphate
  modified_base 17: mod_base = OTHER; note = 2'-O-methyladenosine-3'-phosphate
  modified_base 18: mod_base = OTHER; note = 2'-O-methyladenosine-3'-phosphate
  modified_base 19: mod_base = OTHER; note = 2'-O-methylguanosine-3'-phosphate
  modified_base 20: mod_base = OTHER; note = 2'-O-methyladenosine-3'-phosphate
  modified_base 21: mod_base = OTHER; note = 2'-O-methyladenosine-3'-phosphorothioate
  modified_base 22: mod_base = OTHER; note = 2'-O-methylcytidine-3'-phosphorothioate
  modified_base 23: mod_base = OTHER; note = 2'-O-methyladenosine
acacggtttatagagcaagaaca

SEQ ID NO: 423 - RNA, 23 nt, synthetic construct
  source 1..23: mol_type = other RNA
  modified_base 1: mod_base = OTHER; note = 2'-O-methyluridine-3'-phosphorothioate
  modified_base 2: mod_base = OTHER; note = 2'-deoxy-2'-fluoroguanosine-3'-phosphorothioate
  modified_base 3: mod_base = OTHER; note = 2'-O-methyluridine-3'-phosphate
  modified_base 4: mod_base = OTHER; note = 2'-O-methyluridine-3'-phosphate
  modified_base 5: mod_base = OTHER; note 2-(1R-(uracil-1-yl)-2S-hydroxypropoxy)-1,3-dihydroxybutane 1-phosphate
  modified_base 6: mod_base = OTHER; note = 2'-O-methyladenosine-3'-phosphate
  modified_base 7: mod_base = OTHER; note = 2'-O-methyluridine-3'-phosphate
  modified_base 8: mod_base = OTHER; note = 2'-O-methyladenosine-3'-phosphate
  modified_base 9: mod_base = OTHER; note = 2'-O-methylguanosine-3'-phosphate
  modified_base 10: mod_base = OTHER; note = 2'-O-methyladenosine-3'-phosphate
  modified_base 11: mod_base = OTHER; note = 2'-O-methylguanosine-3'-phosphate
  modified_base 12: mod_base = OTHER; note = 2'-O-methylcytidine-3'-phosphate
  modified_base 13: mod_base = OTHER; note = 2'-O-methyladenosine-3'-phosphate
  modified_base 14: mod_base = OTHER; note = 2'-deoxy-2'-fluoroadenosine-3'-phosphate
  modified_base 15: mod_base = OTHER; note = 2'-O-methylguanosine-3'-phosphate
  modified_base 16: mod_base = OTHER; note = 2'-deoxy-2'-fluoroadenosine-3'-phosphate
  modified_base 17: mod_base = OTHER; note = 2'-O-methyladenosine-3'-phosphate
  modified_base 18: mod_base = OTHER; note = 2'-O-methylcytidine-3'-phosphate
  modified_base 19: mod_base = OTHER; note = 2'-O-methyladenosine-3'-phosphate
  modified_base 20: mod_base = OTHER; note = 2'-O-methylcytidine-3'-phosphate
  modified_base 21: mod_base = OTHER; note = 2'-O-methyluridine-3'-phosphorothioate
  modified_base 22: mod_base = OTHER; note = 2'-O-methylguanosine-3'-phosphorothioate
  modified_base 23: mod_base = OTHER; note = 2'-O-methyluridine
tgtttatagagcaagaacactgt

SEQ ID NO: 424 - RNA, 23 nt, synthetic construct
  source 1..23: mol_type = other RNA
  modified_base 1: mod_base = OTHER; note = 2'-O-methyluridine-3'-phosphorothioate
  modified_base 2: mod_base = OTHER; note = 2'-deoxy-2'-fluoroguanosine-3'-phosphorothioate
  modified_base 3: mod_base = OTHER; note = 2'-O-methyluridine-3'-phosphate
  modified_base 4: mod_base = OTHER; note = 2'-O-methyluridine-3'-phosphate
  modified_base 5: mod_base = OTHER; note = 2'-O-methyluridine-3'-phosphate
  modified_base 6: mod_base = OTHER; note = 2'-O-methyladenosine-3'-phosphate
  modified_base 7: mod_base = OTHER; note 2-(1R-(uracil-1-yl)-2-hydroxyethoxy)-1,3-(2S,3R)-dihydroxyb utane 1-phosphate
  modified_base 8: mod_base = OTHER; note = 2'-O-methyladenosine-3'-phosphate
  modified_base 9: mod_base = OTHER; note = 2'-O-methylguanosine-3'-phosphate
  modified_base 10: mod_base = OTHER; note = 2'-O-methyladenosine-3'-phosphate
  modified_base 11: mod_base = OTHER; note = 2'-O-methylguanosine-3'-phosphate
  modified_base 12: mod_base = OTHER; note = 2'-O-methylcytidine-3'-phosphate
  modified_base 13: mod_base = OTHER; note = 2'-O-methyladenosine-3'-phosphate
  modified_base 14: mod_base = OTHER; note = 2'-deoxy-2'-fluoroadenosine-3'-phosphate
  modified_base 15: mod_base = OTHER; note = 2'-O-methylguanosine-3'-phosphate
  modified_base 16: mod_base = OTHER; note = 2'-deoxy-2'-fluoroadenosine-3'-phosphate
  modified_base 17: mod_base = OTHER; note = 2'-O-methyladenosine-3'-phosphate
  modified_base 18: mod_base = OTHER; note = 2'-O-methylcytidine-3'-phosphate
  modified_base 19: mod_base = OTHER; note = 2'-O-methyladenosine-3'-phosphate
  modified_base 20: mod_base = OTHER; note = 2'-O-methylcytidine-3'-phosphate
  modified_base 21: mod_base = OTHER; note = 2'-O-methyluridine-3'-phosphorothioate
  modified_base 22: mod_base = OTHER; note = 2'-O-methylguanosine-3'-phosphorothioate
  modified_base 23: mod_base = OTHER; note = 2'-O-methyluridine
tgtttatagagcaagaacactgt

SEQ ID NO: 425 - RNA, 12 nt, synthetic construct
  source 1..12: mol_type = other RNA
tacagtctatgt

SEQ ID NO: 426 - RNA, 12 nt, synthetic construct
  source 1..12: mol_type = other RNA
tacagtctatgt

SEQ ID NO: 427 - RNA, 12 nt, synthetic construct
  source 1..12: mol_type = other RNA
  modified_base 7: mod_base = OTHER; note 1-deoxy-1-(5-methylcytosin-1-yl)-alpha-L-threofuranose 2-phosphate
tacagtctatgt

SEQ ID NO: 428 - RNA, 12 nt, synthetic construct
  source 1..12: mol_type = other RNA
tacagtctatgt

SEQ ID NO: 429 - RNA, 12 nt, synthetic construct
  source 1..12: mol_type = other RNA
  modified_base 6: mod_base = OTHER; note = 1-deoxy-1-(thymin-1-yl)-alpha-L-threofuranose 2-phosphate
tacagtctatgt

SEQ ID NO: 430 - RNA, 12 nt, synthetic construct
  source 1..12: mol_type = other RNA
  modified_base 6: mod_base = OTHER; note = 1-deoxy-1-(thymin-1-yl)-alpha-L-threofuranose 2-phosphate
tacagtctatgt

SEQ ID NO: 431 - RNA, 12 nt, synthetic construct
  source 1..12: mol_type = other RNA
  modified_base 7: mod_base = OTHER; note 1-deoxy-1-(5-methylcytosin-1-yl)-alpha-L-threofuranose 2-phosphate
tacagtctatgt

SEQ ID NO: 432 - RNA, 12 nt, synthetic construct
  source 1..12: mol_type = other RNA
tacagtctatgt

SEQ ID NO: 433 - RNA, 12 nt, synthetic construct
  source 1..12: mol_type = other RNA
tacagtctatgt

SEQ ID NO: 434 - RNA, 12 nt, synthetic construct
  source 1..12: mol_type = other RNA
  modified_base 7: mod_base = OTHER; note = 2'-deoxy-2'-fluorocytidine-3'-phosphate
tacagtctatgt

SEQ ID NO: 435 - RNA, 12 nt, synthetic construct
  source 1..12: mol_type = other RNA
tacagtctatgt

SEQ ID NO: 436 - RNA, 12 nt, synthetic construct
  source 1..12: mol_type = other RNA
  modified_base 6: mod_base = OTHER; note = 2'-deoxy-2'-fluorouridine-3'-phosphate
tacagtctatgt

SEQ ID NO: 437 - RNA, 12 nt, synthetic construct
  source 1..12: mol_type = other RNA
  modified_base 6: mod_base = OTHER; note = 2'-deoxy-2'-fluorouridine-3'-phosphate
tacagtctatgt

SEQ ID NO: 438 - RNA, 12 nt, synthetic construct
  source 1..12: mol_type = other RNA
  modified_base 7: mod_base = OTHER; note = 2'-deoxy-2'-fluorocytidine-3'-phosphate
tacagtctatgt

SEQ ID NO: 439 - DNA, 12 bp, synthetic construct
  source 1..12: mol_type = other DNA
tacagtctatgt

SEQ ID NO: 440 - DNA, 12 bp, synthetic construct
  source 1..12: mol_type = other DNA
tacagtctatgt

SEQ ID NO: 441 - DNA, 12 bp, synthetic construct
  source 1..12: mol_type = other DNA
  modified_base 7: mod_base = OTHER; note 1-deoxy-1-(5-methylcytosin-1-yl)-alpha-L-threofuranose 2-phosphate
  misc_feature 7: note = RNA
  misc_feature 1..6: note = DNA
tacagtctatgt

SEQ ID NO: 442 - DNA, 12 bp, synthetic construct
  source 1..12: mol_type = other DNA
tacagtctatgt

SEQ ID NO: 443 - DNA, 12 bp, synthetic construct
  source 1..12: mol_type = other DNA
  modified_base 6: mod_base = OTHER; note = 1-deoxy-1-(thymin-1-yl)-alpha-L-threofuranose 2-phosphate
  misc_feature 6: note = RNA
  misc_feature 1..5: note = DNA
tacagtctatgt

SEQ ID NO: 444 - DNA, 12 bp, synthetic construct
  source 1..12: mol_type = other DNA
  modified_base 6: mod_base = OTHER; note = 1-deoxy-1-(thymin-1-yl)-alpha-L-threofuranose 2-phosphate
  misc_feature 6: note = RNA
  misc_feature 1..5: note = DNA
tacagtctatgt

SEQ ID NO: 445 - DNA, 12 bp, synthetic construct
  source 1..12: mol_type = other DNA
  modified_base 7: mod_base = OTHER; note 1-deoxy-1-(5-methylcytosin-1-yl)-alpha-L-threofuranose 2-phosphate
  misc_feature 7: note = RNA
  misc_feature 1..6: note = DNA
tacagtctatgt

SEQ ID NO: 446 - DNA, 12 bp, synthetic construct
  source 1..12: mol_type = other DNA
tacagtctatgt

SEQ ID NO: 447 - DNA, 12 bp, synthetic construct
  source 1..12: mol_type = other DNA
tacagtctatgt

SEQ ID NO: 448 - DNA, 12 bp, synthetic construct
  source 1..12: mol_type = other DNA
  modified_base 7: mod_base = OTHER; note = 2'-deoxy-2'-fluorocytidine-3'-phosphate
  misc_feature 7: note = RNA
  misc_feature 1..6: note = DNA
tacagtctatgt

SEQ ID NO: 449 - DNA, 12 bp, synthetic construct
  source 1..12: mol_type = other DNA
tacagtctatgt

SEQ ID NO: 450 - DNA, 12 bp, synthetic construct
  source 1..12: mol_type = other DNA
  modified_base 6: mod_base = OTHER; note = 2'-deoxy-2'-fluorouridine-3'-phosphate
  misc_feature 6: note = RNA
  misc_feature 1..5: note = DNA
tacagtctatgt

SEQ ID NO: 451 - DNA, 12 bp, synthetic construct
  source 1..12: mol_type = other DNA
  modified_base 6: mod_base = OTHER; note = 2'-deoxy-2'-fluorouridine-3'-phosphate
  misc_feature 6: note = RNA
  misc_feature 1..5: note = DNA
tacagtctatgt

SEQ ID NO: 452 - DNA, 12 bp, synthetic construct
  source 1..12: mol_type = other DNA
  modified_base 7: mod_base = OTHER; note = 2'-deoxy-2'-fluorocytidine-3'-phosphate
  misc_feature 7: note = RNA
  misc_feature 1..6: note = DNA
tacagtctatgt

SEQ ID NO: 453 - RNA, 12 nt, synthetic construct
  source 1..12: mol_type = other RNA
acatagactgta

SEQ ID NO: 454 - RNA, 12 nt, synthetic construct
  source 1..12: mol_type = other RNA
  modified_base 7: mod_base = OTHER; note = 1-deoxy-1-(adenin-9-yl)-alpha-L-threofuranose 2-phosphate
acatagactgta

SEQ ID NO: 455 - RNA, 12 nt, synthetic construct
  source 1..12: mol_type = other RNA
acatagactgta

SEQ ID NO: 456 - RNA, 12 nt, synthetic construct
  source 1..12: mol_type = other RNA
  modified_base 6: mod_base = OTHER; note = 1-deoxy-1-(guanin-9-yl)-alpha-L-threofuranose 2-phosphate
acatagactgta

SEQ ID NO: 457 - RNA, 12 nt, synthetic construct
  source 1..12: mol_type = other RNA
acatagactgta

SEQ ID NO: 458 - RNA, 12 nt, synthetic construct
  source 1..12: mol_type = other RNA
  modified_base 7: mod_base = OTHER; note = 1-deoxy-1-(adenin-9-yl)-alpha-L-threofuranose 2-phosphate
acatagactgta

SEQ ID NO: 459 - RNA, 12 nt, synthetic construct
  source 1..12: mol_type = other RNA
  modified_base 6: mod_base = OTHER; note = 1-deoxy-1-(guanin-9-yl)-alpha-L-threofuranose 2-phosphate
acatagactgta

SEQ ID NO: 460 - RNA, 12 nt, synthetic construct
  source 1..12: mol_type = other RNA
acatagactgta

SEQ ID NO: 461 - RNA, 12 nt, synthetic construct
  source 1..12: mol_type = other RNA
  modified_base 7: mod_base = OTHER; note = 2'-deoxy-2'-fluoroadenosine-3'-phosphate
acatagactgta

SEQ ID NO: 462 - RNA, 12 nt, synthetic construct
  source 1..12: mol_type = other RNA
acatagactgta

SEQ ID NO: 463 - RNA, 12 nt, synthetic construct
  source 1..12: mol_type = other RNA
  modified_base 6: mod_base = OTHER; note = 2'-deoxy-2'-fluoroguanosine-3'-phosphate
acatagactgta

SEQ ID NO: 464 - RNA, 12 nt, synthetic construct
  source 1..12: mol_type = other RNA
acatagactgta

SEQ ID NO: 465 - RNA, 12 nt, synthetic construct
  source 1..12: mol_type = other RNA
  modified_base 7: mod_base = OTHER; note = 2'-deoxy-2'-fluoroadenosine-3'-phosphate
acatagactgta

SEQ ID NO: 466 - RNA, 12 nt, synthetic construct
  source 1..12: mol_type = other RNA
  modified_base 6: mod_base = OTHER; note = 2'-deoxy-2'-fluoroguanosine-3'-phosphate
acatagactgta

SEQ ID NO: 467 - DNA, 12 bp, synthetic construct
  source 1..12: mol_type = other DNA
acatagactgta

SEQ ID NO: 468 - DNA, 12 bp, synthetic construct
  source 1..12: mol_type = other DNA
  modified_base 7: mod_base = OTHER; note = 1-deoxy-1-(adenin-9-yl)-alpha-L-threofuranose 2-phosphate
  misc_feature 7: note = RNA
  misc_feature 1..6: note = DNA
acatagactgta

SEQ ID NO: 469 - DNA, 12 bp, synthetic construct
  source 1..12: mol_type = other DNA
acatagactgta

SEQ ID NO: 470 - DNA, 12 bp, synthetic construct
  source 1..12: mol_type = other DNA
  modified_base 6: mod_base = OTHER; note = 1-deoxy-1-(guanin-9-yl)-alpha-L-threofuranose 2-phosphate
  misc_feature 6: note = RNA
  misc_feature 1..5: note = DNA
acatagactgta

SEQ ID NO: 471 - DNA, 12 bp, synthetic construct
  source 1..12: mol_type = other DNA
acatagactgta

SEQ ID NO: 472 - DNA, 12 bp, synthetic construct
  source 1..12: mol_type = other DNA
  modified_base 7: mod_base = OTHER; note = 1-deoxy-1-(adenin-9-yl)-alpha-L-threofuranose 2-phosphate
  misc_feature 7: note = RNA
  misc_feature 1..6: note = DNA
acatagactgta

SEQ ID NO: 473 - DNA, 12 bp, synthetic construct
  source 1..12: mol_type = other DNA
  modified_base 6: mod_base = OTHER; note = 1-deoxy-1-(guanin-9-yl)-alpha-L-threofuranose 2-phosphate
  misc_feature 6: note = RNA
  misc_feature 1..5: note = DNA
acatagactgta

SEQ ID NO: 474 - DNA, 12 bp, synthetic construct
  source 1..12: mol_type = other DNA
acatagactgta

SEQ ID NO: 475 - DNA, 12 bp, synthetic construct
  source 1..12: mol_type = other DNA
  modified_base 7: mod_base = OTHER; note = 2'-deoxy-2'-fluoroadenosine-3'-phosphate
  misc_feature 7: note = RNA
  misc_feature 1..6: note = DNA
acatagactgta

SEQ ID NO: 476 - DNA, 12 bp, synthetic construct
  source 1..12: mol_type = other DNA
acatagactgta

SEQ ID NO: 477 - DNA, 12 bp, synthetic construct
  source 1..12: mol_type = other DNA
  modified_base 6: mod_base = OTHER; note = 2'-deoxy-2'-fluoroguanosine-3'-phosphate
  misc_feature 6: note = RNA
  misc_feature 1..5: note = DNA
acatagactgta

SEQ ID NO: 478 - DNA, 12 bp, synthetic construct
  source 1..12: mol_type = other DNA
acatagactgta

SEQ ID NO: 479 - DNA, 12 bp, synthetic construct
  source 1..12: mol_type = other DNA
  modified_base 7: mod_base = OTHER; note = 2'-deoxy-2'-fluoroadenosine-3'-phosphate
  misc_feature 7: note = RNA
  misc_feature 1..6: note = DNA
acatagactgta

SEQ ID NO: 480 - DNA, 12 bp, synthetic construct
  source 1..12: mol_type = other DNA
  modified_base 6: mod_base = OTHER; note = 2'-deoxy-2'-fluoroguanosine-3'-phosphate
  misc_feature 6: note = RNA
  misc_feature 1..5: note = DNA
acatagactgta

SEQ ID NO: 481 - RNA, 21 nt, synthetic construct
  source 1..21: mol_type = other RNA
  modified_base 1: mod_base = OTHER; note = 2'-deoxy-2'-fluoroadenosine-3'-phosphorothioate
  modified_base 2: mod_base = OTHER; note = 2'-O-methyladenosine-3'-phosphorothioate
  modified_base 3: mod_base = OTHER; note = 2'-deoxy-2'-fluorocytidine-3'-phosphate
  modified_base 4: mod_base = OTHER; note = 2'-O-methyladenosine-3'-phosphate
  modified_base 5: mod_base = OTHER; note = 2'-deoxy-2'-fluoroguanosine-3'-phosphate
  modified_base 6: mod_base = OTHER; note = 2'-O-methyluridine-3'-phosphate
  modified_base 7: mod_base = OTHER; note = 2'-deoxy-2'-fluoroguanosine-3'-phosphate
  modified_base 8: mod_base = OTHER; note = 2'-O-methyluridine-3'-phosphate
  modified_base 9: mod_base = OTHER; note = 2'-deoxy-2'-fluorouridine-3'-phosphate
  modified_base 10: mod_base = OTHER; note = 2'-deoxy-2'-fluorocytidine-3'-phosphate
  modified_base 11: mod_base = OTHER; note = 2'-deoxy-2'-fluorouridine-3'-phosphate
  modified_base 12: mod_base = OTHER; note = 2'-O-methyluridine-3'-phosphate
  modified_base 13: mod_base = OTHER; note = 2'-deoxy-2'-fluoroguanosine-3'-phosphate
  modified_base 14: mod_base = OTHER; note = 2'-O-methylcytidine-3'-phosphate
  modified_base 15: mod_base = OTHER; note = 2'-deoxy-2'-fluorouridine-3'-phosphate
  modified_base 16: mod_base = OTHER; note = 2'-O-methylcytidine-3'-phosphate
  modified_base 17: mod_base = OTHER; note = 2'-deoxy-2'-fluorouridine-3'-phosphate
  modified_base 18: mod_base = OTHER; note = 2'-O-methyladenosine-3'-phosphate
  modified_base 19: mod_base = OTHER; note = 2'-deoxy-2'-fluorouridine-3'-phosphate
  modified_base 20: mod_base = OTHER; note = 2'-O-methyladenosine-3'-phosphate
  modified_base 21: mod_base = OTHER; note = 2'-deoxy-2'-fluoroadenosine-3'-phosphate conjugated at the 3'-end to an L96 ligand
aacagtgttcttgctctataa

SEQ ID NO: 482 - RNA, 21 nt, synthetic construct
  source 1..21: mol_type = other RNA
  modified_base 1: mod_base = OTHER; note = 1-deoxy-1-(adenin-9-yl)-alpha-L-threofuranose 2-phosphorothioate
  modified_base 2: mod_base = OTHER; note = 2'-O-methyladenosine-3'-phosphorothioate
  modified_base 3: mod_base = OTHER; note = 2'-deoxy-2'-fluorocytidine-3'-phosphate
  modified_base 4: mod_base = OTHER; note = 2'-O-methyladenosine-3'-phosphate
  modified_base 5: mod_base = OTHER; note = 2'-deoxy-2'-fluoroguanosine-3'-phosphate
  modified_base 6: mod_base = OTHER; note = 2'-O-methyluridine-3'-phosphate
  modified_base 7: mod_base = OTHER; note = 2'-deoxy-2'-fluoroguanosine-3'-phosphate
  modified_base 8: mod_base = OTHER; note = 2'-O-methyluridine-3'-phosphate
  modified_base 9: mod_base = OTHER; note = 2'-deoxy-2'-fluorouridine-3'-phosphate
  modified_base 10: mod_base = OTHER; note = 2'-deoxy-2'-fluorocytidine-3'-phosphate
  modified_base 11: mod_base = OTHER; note = 2'-deoxy-2'-fluorouridine-3'-phosphate
  modified_base 12: mod_base = OTHER; note = 2'-O-methyluridine-3'-phosphate
  modified_base 13: mod_base = OTHER; note = 2'-deoxy-2'-fluoroguanosine-3'-phosphate
  modified_base 14: mod_base = OTHER; note = 2'-O-methylcytidine-3'-phosphate
  modified_base 15: mod_base = OTHER; note = 2'-deoxy-2'-fluorouridine-3'-phosphate
  modified_base 16: mod_base = OTHER; note = 2'-O-methylcytidine-3'-phosphate
  modified_base 17: mod_base = OTHER; note = 2'-deoxy-2'-fluorouridine-3'-phosphate
  modified_base 18: mod_base = OTHER; note = 2'-O-methyladenosine-3'-phosphate
  modified_base 19: mod_base = OTHER; note = 2'-deoxy-2'-fluorouridine-3'-phosphate
  modified_base 20: mod_base = OTHER; note = 2'-O-methyladenosine-3'-phosphate
  modified_base 21: mod_base = OTHER; note = 2'-deoxy-2'-fluoroadenosine-3'-phosphate conjugated at the 3'-end to an L96 ligand
aacagtgttcttgctctataa

SEQ ID NO: 483 - RNA, 21 nt, synthetic construct
  source 1..21: mol_type = other RNA
  modified_base 1: mod_base = OTHER; note = 2'-deoxy-2'-fluoroadenosine-3'-phosphorothioate
  modified_base 2: mod_base = OTHER; note = 1-deoxy-1-(adenin-9-yl)-alpha-L-threofuranose 2-phosphorothioate
  modified_base 3: mod_base = OTHER; note = 2'-deoxy-2'-fluorocytidine-3'-phosphate
  modified_base 4: mod_base = OTHER; note = 2'-O-methyladenosine-3'-phosphate
  modified_base 5: mod_base = OTHER; note = 2'-deoxy-2'-fluoroguanosine-3'-phosphate
  modified_base 6: mod_base = OTHER; note = 2'-O-methyluridine-3'-phosphate
  modified_base 7: mod_base = OTHER; note = 2'-deoxy-2'-fluoroguanosine-3'-phosphate
  modified_base 8: mod_base = OTHER; note = 2'-O-methyluridine-3'-phosphate
  modified_base 9: mod_base = OTHER; note = 2'-deoxy-2'-fluorouridine-3'-phosphate
  modified_base 10: mod_base = OTHER; note = 2'-deoxy-2'-fluorocytidine-3'-phosphate
  modified_base 11: mod_base = OTHER; note = 2'-deoxy-2'-fluorouridine-3'-phosphate
  modified_base 12: mod_base = OTHER; note = 2'-O-methyluridine-3'-phosphate
  modified_base 13: mod_base = OTHER; note = 2'-deoxy-2'-fluoroguanosine-3'-phosphate
  modified_base 14: mod_base = OTHER; note = 2'-O-methylcytidine-3'-phosphate
  modified_base 15: mod_base = OTHER; note = 2'-deoxy-2'-fluorouridine-3'-phosphate
  modified_base 16: mod_base = OTHER; note = 2'-O-methylcytidine-3'-phosphate
  modified_base 17: mod_base = OTHER; note = 2'-deoxy-2'-fluorouridine-3'-phosphate
  modified_base 18: mod_base = OTHER; note = 2'-O-methyladenosine-3'-phosphate
  modified_base 19: mod_base = OTHER; note = 2'-deoxy-2'-fluorouridine-3'-phosphate
  modified_base 20: mod_base = OTHER; note = 2'-O-methyladenosine-3'-phosphate
  modified_base 21: mod_base = OTHER; note = 2'-deoxy-2'-fluoroadenosine-3'-phosphate conjugated at the 3'-end to an L96 ligand
aacagtgttcttgctctataa

SEQ ID NO: 484 - RNA, 21 nt, synthetic construct
  source 1..21: mol_type = other RNA
  modified_base 1: mod_base = OTHER; note = 2'-deoxy-2'-fluoroadenosine-3'-phosphorothioate
  modified_base 2: mod_base = OTHER; note = 2'-O-methyladenosine-3'-phosphorothioate
  modified_base 3: mod_base = OTHER; note 1-deoxy-1-(5-methylcytosin-1-yl)-alpha-L-threofuranose 2-phosphate
  modified_base 4: mod_base = OTHER; note = 2'-O-methyladenosine-3'-phosphate
  modified_base 5: mod_base = OTHER; note = 2'-deoxy-2'-fluoroguanosine-3'-phosphate
  modified_base 6: mod_base = OTHER; note = 2'-O-methyluridine-3'-phosphate
  modified_base 7: mod_base = OTHER; note = 2'-deoxy-2'-fluoroguanosine-3'-phosphate
  modified_base 8: mod_base = OTHER; note = 2'-O-methyluridine-3'-phosphate
  modified_base 9: mod_base = OTHER; note = 2'-deoxy-2'-fluorouridine-3'-phosphate
  modified_base 10: mod_base = OTHER; note = 2'-deoxy-2'-fluorocytidine-3'-phosphate
  modified_base 11: mod_base = OTHER; note = 2'-deoxy-2'-fluorouridine-3'-phosphate
  modified_base 12: mod_base = OTHER; note = 2'-O-methyluridine-3'-phosphate
  modified_base 13: mod_base = OTHER; note = 2'-deoxy-2'-fluoroguanosine-3'-phosphate
  modified_base 14: mod_base = OTHER; note = 2'-O-methylcytidine-3'-phosphate
  modified_base 15: mod_base = OTHER; note = 2'-deoxy-2'-fluorouridine-3'-phosphate
  modified_base 16: mod_base = OTHER; note = 2'-O-methylcytidine-3'-phosphate
  modified_base 17: mod_base = OTHER; note = 2'-deoxy-2'-fluorouridine-3'-phosphate
  modified_base 18: mod_base = OTHER; note = 2'-O-methyladenosine-3'-phosphate
  modified_base 19: mod_base = OTHER; note = 2'-deoxy-2'-fluorouridine-3'-phosphate
  modified_base 20: mod_base = OTHER; note = 2'-O-methyladenosine-3'-phosphate
  modified_base 21: mod_base = OTHER; note = 2'-deoxy-2'-fluoroadenosine-3'-phosphate conjugated at the 3'-end to an L96 ligand
aacagtgttcttgctctataa

SEQ ID NO: 485 - RNA, 21 nt, synthetic construct
  source 1..21: mol_type = other RNA
  modified_base 1: mod_base = OTHER; note = 2'-deoxy-2'-fluoroadenosine-3'-phosphorothioate
  modified_base 2: mod_base = OTHER; note = 2'-O-methyladenosine-3'-phosphorothioate
  modified_base 3: mod_base = OTHER; note = 2'-deoxy-2'-fluorocytidine-3'-phosphate
  modified_base 4: mod_base = OTHER; note = 1-deoxy-1-(adenin-9-yl)-alpha-L-threofuranose 2-phosphate
  modified_base 5: mod_base = OTHER; note = 2'-deoxy-2'-fluoroguanosine-3'-phosphate
  modified_base 6: mod_base = OTHER; note = 2'-O-methyluridine-3'-phosphate
  modified_base 7: mod_base = OTHER; note = 2'-deoxy-2'-fluoroguanosine-3'-phosphate
  modified_base 8: mod_base = OTHER; note = 2'-O-methyluridine-3'-phosphate
  modified_base 9: mod_base = OTHER; note = 2'-deoxy-2'-fluorouridine-3'-phosphate
  modified_base 10: mod_base = OTHER; note = 2'-deoxy-2'-fluorocytidine-3'-phosphate
  modified_base 11: mod_base = OTHER; note = 2'-deoxy-2'-fluorouridine-3'-phosphate
  modified_base 12: mod_base = OTHER; note = 2'-O-methyluridine-3'-phosphate
  modified_base 13: mod_base = OTHER; note = 2'-deoxy-2'-fluoroguanosine-3'-phosphate
  modified_base 14: mod_base = OTHER; note = 2'-O-methylcytidine-3'-phosphate
  modified_base 15: mod_base = OTHER; note = 2'-deoxy-2'-fluorouridine-3'-phosphate
  modified_base 16: mod_base = OTHER; note = 2'-O-methylcytidine-3'-phosphate
  modified_base 17: mod_base = OTHER; note = 2'-deoxy-2'-fluorouridine-3'-phosphate
  modified_base 18: mod_base = OTHER; note = 2'-O-methyladenosine-3'-phosphate
  modified_base 19: mod_base = OTHER; note = 2'-deoxy-2'-fluorouridine-3'-phosphate
  modified_base 20: mod_base = OTHER; note = 2'-O-methyladenosine-3'-phosphate
  modified_base 21: mod_base = OTHER; note = 2'-deoxy-2'-fluoroadenosine-3'-phosphate conjugated at the 3'-end to an L96 ligand
aacagtgttcttgctctataa

SEQ ID NO: 486 - RNA, 21 nt, synthetic construct
  source 1..21: mol_type = other RNA
  modified_base 1: mod_base = OTHER; note = 2'-deoxy-2'-fluoroadenosine-3'-phosphorothioate
  modified_base 2: mod_base = OTHER; note = 2'-O-methyladenosine-3'-phosphorothioate
  modified_base 3: mod_base = OTHER; note = 2'-deoxy-2'-fluorocytidine-3'-phosphate
  modified_base 4: mod_base = OTHER; note = 2'-O-methyladenosine-3'-phosphate
  modified_base 5: mod_base = OTHER; note = 1-deoxy-1-(guanin-9-yl)-alpha-L-threofuranose 2-phosphate
  modified_base 6: mod_base = OTHER; note = 2'-O-methyluridine-3'-phosphate
  modified_base 7: mod_base = OTHER; note = 2'-deoxy-2'-fluoroguanosine-3'-phosphate
  modified_base 8: mod_base = OTHER; note = 2'-O-methyluridine-3'-phosphate
  modified_base 9: mod_base = OTHER; note = 2'-deoxy-2'-fluorouridine-3'-phosphate
  modified_base 10: mod_base = OTHER; note = 2'-deoxy-2'-fluorocytidine-3'-phosphate
  modified_base 11: mod_base = OTHER; note = 2'-deoxy-2'-fluorouridine-3'-phosphate
  modified_base 12: mod_base = OTHER; note = 2'-O-methyluridine-3'-phosphate
  modified_base 13: mod_base = OTHER; note = 2'-deoxy-2'-fluoroguanosine-3'-phosphate
  modified_base 14: mod_base = OTHER; note = 2'-O-methylcytidine-3'-phosphate
  modified_base 15: mod_base = OTHER; note = 2'-deoxy-2'-fluorouridine-3'-phosphate
  modified_base 16: mod_base = OTHER; note = 2'-O-methylcytidine-3'-phosphate
  modified_base 17: mod_base = OTHER; note = 2'-deoxy-2'-fluorouridine-3'-phosphate
  modified_base 18: mod_base = OTHER; note = 2'-O-methyladenosine-3'-phosphate
  modified_base 19: mod_base = OTHER; note = 2'-deoxy-2'-fluorouridine-3'-phosphate
  modified_base 20: mod_base = OTHER; note = 2'-O-methyladenosine-3'-phosphate
  modified_base 21: mod_base = OTHER; note = 2'-deoxy-2'-fluoroadenosine-3'-phosphate conjugated at the 3'-end to an L96 ligand
aacagtgttcttgctctataa

SEQ ID NO: 487 - RNA, 21 nt, synthetic construct
  source 1..21: mol_type = other RNA
  modified_base 1: mod_base = OTHER; note = 2'-deoxy-2'-fluoroadenosine-3'-phosphorothioate
  modified_base 2: mod_base = OTHER; note = 2'-O-methyladenosine-3'-phosphorothioate
  modified_base 3: mod_base = OTHER; note = 2'-deoxy-2'-fluorocytidine-3'-phosphate
  modified_base 4: mod_base = OTHER; note = 2'-O-methyladenosine-3'-phosphate
  modified_base 5: mod_base = OTHER; note = 2'-deoxy-2'-fluoroguanosine-3'-phosphate
  modified_base 6: mod_base = OTHER; note = 1-deoxy-1-(thymin-1-yl)-alpha-L-threofuranose 2-phosphate
  modified_base 7: mod_base = OTHER; note = 2'-deoxy-2'-fluoroguanosine-3'-phosphate
  modified_base 8: mod_base = OTHER; note = 2'-O-methyluridine-3'-phosphate
  modified_base 9: mod_base = OTHER; note = 2'-deoxy-2'-fluorouridine-3'-phosphate
  modified_base 10: mod_base = OTHER; note = 2'-deoxy-2'-fluorocytidine-3'-phosphate
  modified_base 11: mod_base = OTHER; note = 2'-deoxy-2'-fluorouridine-3'-phosphate
  modified_base 12: mod_base = OTHER; note = 2'-O-methyluridine-3'-phosphate
  modified_base 13: mod_base = OTHER; note = 2'-deoxy-2'-fluoroguanosine-3'-phosphate
  modified_base 14: mod_base = OTHER; note = 2'-O-methylcytidine-3'-phosphate
  modified_base 15: mod_base = OTHER; note = 2'-deoxy-2'-fluorouridine-3'-phosphate
  modified_base 16: mod_base = OTHER; note = 2'-O-methylcytidine-3'-phosphate
  modified_base 17: mod_base = OTHER; note = 2'-deoxy-2'-fluorouridine-3'-phosphate
  modified_base 18: mod_base = OTHER; note = 2'-O-methyladenosine-3'-phosphate
  modified_base 19: mod_base = OTHER; note = 2'-deoxy-2'-fluorouridine-3'-phosphate
  modified_base 20: mod_base = OTHER; note = 2'-O-methyladenosine-3'-phosphate
  modified_base 21: mod_base = OTHER; note = 2'-deoxy-2'-fluoroadenosine-3'-phosphate conjugated at the 3'-end to an L96 ligand
aacagtgttcttgctctataa

SEQ ID NO: 488 - RNA, 21 nt, synthetic construct
  source 1..21: mol_type = other RNA
  modified_base 1: mod_base = OTHER; note = 2'-deoxy-2'-fluoroadenosine-3'-phosphorothioate
  modified_base 2: mod_base = OTHER; note = 2'-O-methyladenosine-3'-phosphorothioate
  modified_base 3: mod_base = OTHER; note = 2'-deoxy-2'-fluorocytidine-3'-phosphate
  modified_base 4: mod_base = OTHER; note = 2'-O-methyladenosine-3'-phosphate
  modified_base 5: mod_base = OTHER; note = 2'-deoxy-2'-fluoroguanosine-3'-phosphate
  modified_base 6: mod_base = OTHER; note = 2'-O-methyluridine-3'-phosphate
  modified_base 7: mod_base = OTHER; note = 1-deoxy-1-(guanin-9-yl)-alpha-L-threofuranose 2-phosphate
  modified_base 8: mod_base = OTHER; note = 2'-O-methyluridine-3'-phosphate
  modified_base 9: mod_base = OTHER; note = 2'-deoxy-2'-fluorouridine-3'-phosphate
  modified_base 10: mod_base = OTHER; note = 2'-deoxy-2'-fluorocytidine-3'-phosphate
  modified_base 11: mod_base = OTHER; note = 2'-deoxy-2'-fluorouridine-3'-phosphate
  modified_base 12: mod_base = OTHER; note = 2'-O-methyluridine-3'-phosphate
  modified_base 13: mod_base = OTHER; note = 2'-deoxy-2'-fluoroguanosine-3'-phosphate
  modified_base 14: mod_base = OTHER; note = 2'-O-methylcytidine-3'-phosphate
  modified_base 15: mod_base = OTHER; note = 2'-deoxy-2'-fluorouridine-3'-phosphate
  modified_base 16: mod_base = OTHER; note = 2'-O-methylcytidine-3'-phosphate
  modified_base 17: mod_base = OTHER; note = 2'-deoxy-2'-fluorouridine-3'-phosphate
  modified_base 18: mod_base = OTHER; note = 2'-O-methyladenosine-3'-phosphate
  modified_base 19: mod_base = OTHER; note = 2'-deoxy-2'-fluorouridine-3'-phosphate
  modified_base 20: mod_base = OTHER; note = 2'-O-methyladenosine-3'-phosphate
  modified_base 21: mod_base = OTHER; note = 2'-deoxy-2'-fluoroadenosine-3'-phosphate conjugated at the 3'-end to an L96 ligand
aacagtgttcttgctctataa

SEQ ID NO: 489 - RNA, 21 nt, synthetic construct
  source 1..21: mol_type = other RNA
  modified_base 1: mod_base = OTHER; note = 2'-deoxy-2'-fluoroadenosine-3'-phosphorothioate
  modified_base 2: mod_base = OTHER; note = 2'-O-methyladenosine-3'-phosphorothioate
  modified_base 3: mod_base = OTHER; note = 2'-deoxy-2'-fluorocytidine-3'-phosphate
  modified_base 4: mod_base = OTHER; note = 2'-O-methyladenosine-3'-phosphate
  modified_base 5: mod_base = OTHER; note = 2'-deoxy-2'-fluoroguanosine-3'-phosphate
  modified_base 6: mod_base = OTHER; note = 2'-O-methyluridine-3'-phosphate
  modified_base 7: mod_base = OTHER; note = 2'-deoxy-2'-fluoroguanosine-3'-phosphate
  modified_base 8: mod_base = OTHER; note = 1-deoxy-1-(thymin-1-yl)-alpha-L-threofuranose 2-phosphate
  modified_base 9: mod_base = OTHER; note = 2'-deoxy-2'-fluorouridine-3'-phosphate
  modified_base 10: mod_base = OTHER; note = 2'-deoxy-2'-fluorocytidine-3'-phosphate
  modified_base 11: mod_base = OTHER; note = 2'-deoxy-2'-fluorouridine-3'-phosphate
  modified_base 12: mod_base = OTHER; note = 2'-O-methyluridine-3'-phosphate
  modified_base 13: mod_base = OTHER; note = 2'-deoxy-2'-fluoroguanosine-3'-phosphate
  modified_base 14: mod_base = OTHER; note = 2'-O-methylcytidine-3'-phosphate
  modified_base 15: mod_base = OTHER; note = 2'-deoxy-2'-fluorouridine-3'-phosphate
  modified_base 16: mod_base = OTHER; note = 2'-O-methylcytidine-3'-phosphate
  modified_base 17: mod_base = OTHER; note = 2'-deoxy-2'-fluorouridine-3'-phosphate
  modified_base 18: mod_base = OTHER; note = 2'-O-methyladenosine-3'-phosphate
  modified_base 19: mod_base = OTHER; note = 2'-deoxy-2'-fluorouridine-3'-phosphate
  modified_base 20: mod_base = OTHER; note = 2'-O-methyladenosine-3'-phosphate
  modified_base 21: mod_base = OTHER; note = 2'-deoxy-2'-fluoroadenosine-3'-phosphate conjugated at the 3'-end to an L96 ligand
aacagtgttcttgctctataa

SEQ ID NO: 490 - RNA, 21 nt, synthetic construct
  source 1..21: mol_type = other RNA
  modified_base 1: mod_base = OTHER; note = 2'-deoxy-2'-fluoroadenosine-3'-phosphorothioate
  modified_base 2: mod_base = OTHER; note = 2'-O-methyladenosine-3'-phosphorothioate
  modified_base 3: mod_base = OTHER; note = 2'-deoxy-2'-fluorocytidine-3'-phosphate
  modified_base 4: mod_base = OTHER; note = 2'-O-methyladenosine-3'-phosphate
  modified_base 5: mod_base = OTHER; note = 2'-deoxy-2'-fluoroguanosine-3'-phosphate
  modified_base 6: mod_base = OTHER; note = 2'-O-methyluridine-3'-phosphate
  modified_base 7: mod_base = OTHER; note = 2'-deoxy-2'-fluoroguanosine-3'-phosphate
  modified_base 8: mod_base = OTHER; note = 2'-O-methyluridine-3'-phosphate
  modified_base 9: mod_base = OTHER; note = 1-deoxy-1-(thymin-1-yl)-alpha-L-threofuranose 2-phosphate
  modified_base 10: mod_base = OTHER; note = 2'-deoxy-2'-fluorocytidine-3'-phosphate
  modified_base 11: mod_base = OTHER; note = 2'-deoxy-2'-fluorouridine-3'-phosphate
  modified_base 12: mod_base = OTHER; note = 2'-O-methyluridine-3'-phosphate
  modified_base 13: mod_base = OTHER; note = 2'-deoxy-2'-fluoroguanosine-3'-phosphate
  modified_base 14: mod_base = OTHER; note = 2'-O-methylcytidine-3'-phosphate
  modified_base 15: mod_base = OTHER; note = 2'-deoxy-2'-fluorouridine-3'-phosphate
  modified_base 16: mod_base = OTHER; note = 2'-O-methylcytidine-3'-phosphate
  modified_base 17: mod_base = OTHER; note = 2'-deoxy-2'-fluorouridine-3'-phosphate
  modified_base 18: mod_base = OTHER; note = 2'-O-methyladenosine-3'-phosphate
  modified_base 19: mod_base = OTHER; note = 2'-deoxy-2'-fluorouridine-3'-phosphate
  modified_base 20: mod_base = OTHER; note = 2'-O-methyladenosine-3'-phosphate
  modified_base 21: mod_base = OTHER; note = 2'-deoxy-2'-fluoroadenosine-3'-phosphate conjugated at the 3'-end to an L96 ligand
aacagtgttcttgctctataa

SEQ ID NO: 491 - RNA, 21 nt, synthetic construct
  source 1..21: mol_type = other RNA
  modified_base 1: mod_base = OTHER; note = 2'-deoxy-2'-fluoroadenosine-3'-phosphorothioate
  modified_base 2: mod_base = OTHER; note = 2'-O-methyladenosine-3'-phosphorothioate
  modified_base 3: mod_base = OTHER; note = 2'-deoxy-2'-fluorocytidine-3'-phosphate
  modified_base 4: mod_base = OTHER; note = 2'-O-methyladenosine-3'-phosphate
  modified_base 5: mod_base = OTHER; note = 2'-deoxy-2'-fluoroguanosine-3'-phosphate
  modified_base 6: mod_base = OTHER; note = 2'-O-methyluridine-3'-phosphate
  modified_base 7: mod_base = OTHER; note = 2'-deoxy-2'-fluoroguanosine-3'-phosphate
  modified_base 8: mod_base = OTHER; note = 2'-O-methyluridine-3'-phosphate
  modified_base 9: mod_base = OTHER; note = 2'-deoxy-2'-fluorouridine-3'-phosphate
  modified_base 10: mod_base = OTHER; note 1-deoxy-1-(5-methylcytosin-1-yl)-alpha-L-threofuranose 2-phosphate
  modified_base 11: mod_base = OTHER; note = 2'-deoxy-2'-fluorouridine-3'-phosphate
  modified_base 12: mod_base = OTHER; note = 2'-O-methyluridine-3'-phosphate
  modified_base 13: mod_base = OTHER; note = 2'-deoxy-2'-fluoroguanosine-3'-phosphate
  modified_base 14: mod_base = OTHER; note = 2'-O-methylcytidine-3'-phosphate
  modified_base 15: mod_base = OTHER; note = 2'-deoxy-2'-fluorouridine-3'-phosphate
  modified_base 16: mod_base = OTHER; note = 2'-O-methylcytidine-3'-phosphate
  modified_base 17: mod_base = OTHER; note = 2'-deoxy-2'-fluorouridine-3'-phosphate
  modified_base 18: mod_base = OTHER; note = 2'-O-methyladenosine-3'-phosphate
  modified_base 19: mod_base = OTHER; note = 2'-deoxy-2'-fluorouridine-3'-phosphate
  modified_base 20: mod_base = OTHER; note = 2'-O-methyladenosine-3'-phosphate
  modified_base 21: mod_base = OTHER; note = 2'-deoxy-2'-fluoroadenosine-3'-phosphate conjugated at the 3'-end to an L96 ligand
aacagtgttcttgctctataa

SEQ ID NO: 492 - RNA, 21 nt, synthetic construct
  source 1..21: mol_type = other RNA
  modified_base 1: mod_base = OTHER; note = 2'-deoxy-2'-fluoroadenosine-3'-phosphorothioate
  modified_base 2: mod_base = OTHER; note = 2'-O-methyladenosine-3'-phosphorothioate
  modified_base 3: mod_base = OTHER; note = 2'-deoxy-2'-fluorocytidine-3'-phosphate
  modified_base 4: mod_base = OTHER; note = 2'-O-methyladenosine-3'-phosphate
  modified_base 5: mod_base = OTHER; note = 2'-deoxy-2'-fluoroguanosine-3'-phosphate
  modified_base 6: mod_base = OTHER; note = 2'-O-methyluridine-3'-phosphate
  modified_base 7: mod_base = OTHER; note = 2'-deoxy-2'-fluoroguanosine-3'-phosphate
  modified_base 8: mod_base = OTHER; note = 2'-O-methyluridine-3'-phosphate
  modified_base 9: mod_base = OTHER; note = 2'-deoxy-2'-fluorouridine-3'-phosphate
  modified_base 10: mod_base = OTHER; note = 2'-deoxy-2'-fluorocytidine-3'-phosphate
  modified_base 11: mod_base = OTHER; note = 1-deoxy-1-(thymin-1-yl)-alpha-L-threofuranose 2-phosphate
  modified_base 12: mod_base = OTHER; note = 2'-O-methyluridine-3'-phosphate
  modified_base 13: mod_base = OTHER; note = 2'-deoxy-2'-fluoroguanosine-3'-phosphate
  modified_base 14: mod_base = OTHER; note = 2'-O-methylcytidine-3'-phosphate
  modified_base 15: mod_base = OTHER; note = 2'-deoxy-2'-fluorouridine-3'-phosphate
  modified_base 16: mod_base = OTHER; note = 2'-O-methylcytidine-3'-phosphate
  modified_base 17: mod_base = OTHER; note = 2'-deoxy-2'-fluorouridine-3'-phosphate
  modified_base 18: mod_base = OTHER; note = 2'-O-methyladenosine-3'-phosphate
  modified_base 19: mod_base = OTHER; note = 2'-deoxy-2'-fluorouridine-3'-phosphate
  modified_base 20: mod_base = OTHER; note = 2'-O-methyladenosine-3'-phosphate
  modified_base 21: mod_base = OTHER; note = 2'-deoxy-2'-fluoroadenosine-3'-phosphate conjugated at the 3'-end to an L96 ligand
aacagtgttcttgctctataa

SEQ ID NO: 493 - RNA, 21 nt, synthetic construct
  source 1..21: mol_type = other RNA
  modified_base 1: mod_base = OTHER; note = 2'-deoxy-2'-fluoroadenosine-3'-phosphorothioate
  modified_base 2: mod_base = OTHER; note = 2'-O-methyladenosine-3'-phosphorothioate
  modified_base 3: mod_base = OTHER; note = 2'-deoxy-2'-fluorocytidine-3'-phosphate
  modified_base 4: mod_base = OTHER; note = 2'-O-methyladenosine-3'-phosphate
  modified_base 5: mod_base = OTHER; note = 2'-deoxy-2'-fluoroguanosine-3'-phosphate
  modified_base 6: mod_base = OTHER; note = 2'-O-methyluridine-3'-phosphate
  modified_base 7: mod_base = OTHER; note = 2'-deoxy-2'-fluoroguanosine-3'-phosphate
  modified_base 8: mod_base = OTHER; note = 2'-O-methyluridine-3'-phosphate
  modified_base 9: mod_base = OTHER; note = 2'-deoxy-2'-fluorouridine-3'-phosphate
  modified_base 10: mod_base = OTHER; note = 2'-deoxy-2'-fluorocytidine-3'-phosphate
  modified_base 11: mod_base = OTHER; note = 2'-deoxy-2'-fluorouridine-3'-phosphate
  modified_base 12: mod_base = OTHER; note = 1-deoxy-1-(thymin-1-yl)-alpha-L-threofuranose 2-phosphate
  modified_base 13: mod_base = OTHER; note = 2'-deoxy-2'-fluoroguanosine-3'-phosphate
  modified_base 14: mod_base = OTHER; note = 2'-O-methylcytidine-3'-phosphate
  modified_base 15: mod_base = OTHER; note = 2'-deoxy-2'-fluorouridine-3'-phosphate
  modified_base 16: mod_base = OTHER; note = 2'-O-methylcytidine-3'-phosphate
  modified_base 17: mod_base = OTHER; note = 2'-deoxy-2'-fluorouridine-3'-phosphate
  modified_base 18: mod_base = OTHER; note = 2'-O-methyladenosine-3'-phosphate
  modified_base 19: mod_base = OTHER; note = 2'-deoxy-2'-fluorouridine-3'-phosphate
  modified_base 20: mod_base = OTHER; note = 2'-O-methyladenosine-3'-phosphate
  modified_base 21: mod_base = OTHER; note = 2'-deoxy-2'-fluoroadenosine-3'-phosphate conjugated at the 3'-end to an L96 ligand
aacagtgttcttgctctataa

SEQ ID NO: 494 - RNA, 21 nt, synthetic construct
  source 1..21: mol_type = other RNA
  modified_base 1: mod_base = OTHER; note = 2'-deoxy-2'-fluoroadenosine-3'-phosphorothioate
  modified_base 2: mod_base = OTHER; note = 2'-O-methyladenosine-3'-phosphorothioate
  modified_base 3: mod_base = OTHER; note = 2'-deoxy-2'-fluorocytidine-3'-phosphate
  modified_base 4: mod_base = OTHER; note = 2'-O-methyladenosine-3'-phosphate
  modified_base 5: mod_base = OTHER; note = 2'-deoxy-2'-fluoroguanosine-3'-phosphate
  modified_base 6: mod_base = OTHER; note = 2'-O-methyluridine-3'-phosphate
  modified_base 7: mod_base = OTHER; note = 2'-deoxy-2'-fluoroguanosine-3'-phosphate
  modified_base 8: mod_base = OTHER; note = 2'-O-methyluridine-3'-phosphate
  modified_base 9: mod_base = OTHER; note = 2'-deoxy-2'-fluorouridine-3'-phosphate
  modified_base 10: mod_base = OTHER; note = 2'-deoxy-2'-fluorocytidine-3'-phosphate
  modified_base 11: mod_base = OTHER; note = 2'-deoxy-2'-fluorouridine-3'-phosphate
  modified_base 12: mod_base = OTHER; note = 2'-O-methyluridine-3'-phosphate
  modified_base 13: mod_base = OTHER; note = 1-deoxy-1-(guanin-9-yl)-alpha-L-threofuranose 2-phosphate
  modified_base 14: mod_base = OTHER; note = 2'-O-methylcytidine-3'-phosphate
  modified_base 15: mod_base = OTHER; note = 2'-deoxy-2'-fluorouridine-3'-phosphate
  modified_base 16: mod_base = OTHER; note = 2'-O-methylcytidine-3'-phosphate
  modified_base 17: mod_base = OTHER; note = 2'-deoxy-2'-fluorouridine-3'-phosphate
  modified_base 18: mod_base = OTHER; note = 2'-O-methyladenosine-3'-phosphate
  modified_base 19: mod_base = OTHER; note = 2'-deoxy-2'-fluorouridine-3'-phosphate
  modified_base 20: mod_base = OTHER; note = 2'-O-methyladenosine-3'-phosphate
  modified_base 21: mod_base = OTHER; note = 2'-deoxy-2'-fluoroadenosine-3'-phosphate conjugated at the 3'-end to an L96 ligand
aacagtgttcttgctctataa

SEQ ID NO: 495 - RNA, 21 nt, synthetic construct
  source 1..21: mol_type = other RNA
  modified_base 1: mod_base = OTHER; note = 2'-deoxy-2'-fluoroadenosine-3'-phosphorothioate
  modified_base 2: mod_base = OTHER; note = 2'-O-methyladenosine-3'-phosphorothioate
  modified_base 3: mod_base = OTHER; note = 2'-deoxy-2'-fluorocytidine-3'-phosphate
  modified_base 4: mod_base = OTHER; note = 2'-O-methyladenosine-3'-phosphate
  modified_base 5: mod_base = OTHER; note = 2'-deoxy-2'-fluoroguanosine-3'-phosphate
  modified_base 6: mod_base = OTHER; note = 2'-O-methyluridine-3'-phosphate
  modified_base 7: mod_base = OTHER; note = 2'-deoxy-2'-fluoroguanosine-3'-phosphate
  modified_base 8: mod_base = OTHER; note = 2'-O-methyluridine-3'-phosphate
  modified_base 9: mod_base = OTHER; note = 2'-deoxy-2'-fluorouridine-3'-phosphate
  modified_base 10: mod_base = OTHER; note = 2'-deoxy-2'-fluorocytidine-3'-phosphate
  modified_base 11: mod_base = OTHER; note = 2'-deoxy-2'-fluorouridine-3'-phosphate
  modified_base 12: mod_base = OTHER; note = 2'-O-methyluridine-3'-phosphate
  modified_base 13: mod_base = OTHER; note = 2'-deoxy-2'-fluoroguanosine-3'-phosphate
  modified_base 14: mod_base = OTHER; note 1-deoxy-1-(5-methylcytosin-1-yl)-alpha-L-threofuranose 2-phosphate
  modified_base 15: mod_base = OTHER; note = 2'-deoxy-2'-fluorouridine-3'-phosphate
  modified_base 16: mod_base = OTHER; note = 2'-O-methylcytidine-3'-phosphate
  modified_base 17: mod_base = OTHER; note = 2'-deoxy-2'-fluorouridine-3'-phosphate
  modified_base 18: mod_base = OTHER; note = 2'-O-methyladenosine-3'-phosphate
  modified_base 19: mod_base = OTHER; note = 2'-deoxy-2'-fluorouridine-3'-phosphate
  modified_base 20: mod_base = OTHER; note = 2'-O-methyladenosine-3'-phosphate
  modified_base 21: mod_base = OTHER; note = 2'-deoxy-2'-fluoroadenosine-3'-phosphate conjugated at the 3'-end to an L96 ligand
aacagtgttcttgctctataa

SEQ ID NO: 496 - RNA, 21 nt, synthetic construct
  source 1..21: mol_type = other RNA
  modified_base 1: mod_base = OTHER; note = 2'-deoxy-2'-fluoroadenosine-3'-phosphorothioate
  modified_base 2: mod_base = OTHER; note = 2'-O-methyladenosine-3'-phosphorothioate
  modified_base 3: mod_base = OTHER; note = 2'-deoxy-2'-fluorocytidine-3'-phosphate
  modified_base 4: mod_base = OTHER; note = 2'-O-methyladenosine-3'-phosphate
  modified_base 5: mod_base = OTHER; note = 2'-deoxy-2'-fluoroguanosine-3'-phosphate
  modified_base 6: mod_base = OTHER; note = 2'-O-methyluridine-3'-phosphate
  modified_base 7: mod_base = OTHER; note = 2'-deoxy-2'-fluoroguanosine-3'-phosphate
  modified_base 8: mod_base = OTHER; note = 2'-O-methyluridine-3'-phosphate
  modified_base 9: mod_base = OTHER; note = 2'-deoxy-2'-fluorouridine-3'-phosphate
  modified_base 10: mod_base = OTHER; note = 2'-deoxy-2'-fluorocytidine-3'-phosphate
  modified_base 11: mod_base = OTHER; note = 2'-deoxy-2'-fluorouridine-3'-phosphate
  modified_base 12: mod_base = OTHER; note = 2'-O-methyluridine-3'-phosphate
  modified_base 13: mod_base = OTHER; note = 2'-deoxy-2'-fluoroguanosine-3'-phosphate
  modified_base 14: mod_base = OTHER; note = 2'-O-methylcytidine-3'-phosphate
  modified_base 15: mod_base = OTHER; note = 1-deoxy-1-(thymin-1-yl)-alpha-L-threofuranose 2-phosphate
  modified_base 16: mod_base = OTHER; note = 2'-O-methylcytidine-3'-phosphate
  modified_base 17: mod_base = OTHER; note = 2'-deoxy-2'-fluorouridine-3'-phosphate
  modified_base 18: mod_base = OTHER; note = 2'-O-methyladenosine-3'-phosphate
  modified_base 19: mod_base = OTHER; note = 2'-deoxy-2'-fluorouridine-3'-phosphate
  modified_base 20: mod_base = OTHER; note = 2'-O-methyladenosine-3'-phosphate
  modified_base 21: mod_base = OTHER; note = 2'-deoxy-2'-fluoroadenosine-3'-phosphate conjugated at the 3'-end to an L96 ligand
aacagtgttcttgctctataa

SEQ ID NO: 497 - RNA, 21 nt, synthetic construct
  source 1..21: mol_type = other RNA
  modified_base 1: mod_base = OTHER; note = 2'-deoxy-2'-fluoroadenosine-3'-phosphorothioate
  modified_base 2: mod_base = OTHER; note = 2'-O-methyladenosine-3'-phosphorothioate
  modified_base 3: mod_base = OTHER; note = 2'-deoxy-2'-fluorocytidine-3'-phosphate
  modified_base 4: mod_base = OTHER; note = 2'-O-methyladenosine-3'-phosphate
  modified_base 5: mod_base = OTHER; note = 2'-deoxy-2'-fluoroguanosine-3'-phosphate
  modified_base 6: mod_base = OTHER; note = 2'-O-methyluridine-3'-phosphate
  modified_base 7: mod_base = OTHER; note = 2'-deoxy-2'-fluoroguanosine-3'-phosphate
  modified_base 8: mod_base = OTHER; note = 2'-O-methyluridine-3'-phosphate
  modified_base 9: mod_base = OTHER; note = 2'-deoxy-2'-fluorouridine-3'-phosphate
  modified_base 10: mod_base = OTHER; note = 2'-deoxy-2'-fluorocytidine-3'-phosphate
  modified_base 11: mod_base = OTHER; note = 2'-deoxy-2'-fluorouridine-3'-phosphate
  modified_base 12: mod_base = OTHER; note = 2'-O-methyluridine-3'-phosphate
  modified_base 13: mod_base = OTHER; note = 2'-deoxy-2'-fluoroguanosine-3'-phosphate
  modified_base 14: mod_base = OTHER; note = 2'-O-methylcytidine-3'-phosphate
  modified_base 15: mod_base = OTHER; note = 2'-deoxy-2'-fluorouridine-3'-phosphate
  modified_base 16: mod_base = OTHER; note 1-deoxy-1-(5-methylcytosin-1-yl)-alpha-L-threofuranose 2-phosphate
  modified_base 17: mod_base = OTHER; note = 2'-deoxy-2'-fluorouridine-3'-phosphate
  modified_base 18: mod_base = OTHER; note = 2'-O-methyladenosine-3'-phosphate
  modified_base 19: mod_base = OTHER; note = 2'-deoxy-2'-fluorouridine-3'-phosphate
  modified_base 20: mod_base = OTHER; note = 2'-O-methyladenosine-3'-phosphate
  modified_base 21: mod_base = OTHER; note = 2'-deoxy-2'-fluoroadenosine-3'-phosphate conjugated at the 3'-end to an L96 ligand
aacagtgttcttgctctataa

SEQ ID NO: 498 - RNA, 21 nt, synthetic construct
  source 1..21: mol_type = other RNA
  modified_base 1: mod_base = OTHER; note = 2'-deoxy-2'-fluoroadenosine-3'-phosphorothioate
  modified_base 2: mod_base = OTHER; note = 2'-O-methyladenosine-3'-phosphorothioate
  modified_base 3: mod_base = OTHER; note = 2'-deoxy-2'-fluorocytidine-3'-phosphate
  modified_base 4: mod_base = OTHER; note = 2'-O-methyladenosine-3'-phosphate
  modified_base 5: mod_base = OTHER; note = 2'-deoxy-2'-fluoroguanosine-3'-phosphate
  modified_base 6: mod_base = OTHER; note = 2'-O-methyluridine-3'-phosphate
  modified_base 7: mod_base = OTHER; note = 2'-deoxy-2'-fluoroguanosine-3'-phosphate
  modified_base 8: mod_base = OTHER; note = 2'-O-methyluridine-3'-phosphate
  modified_base 9: mod_base = OTHER; note = 2'-deoxy-2'-fluorouridine-3'-phosphate
  modified_base 10: mod_base = OTHER; note = 2'-deoxy-2'-fluorocytidine-3'-phosphate
  modified_base 11: mod_base = OTHER; note = 2'-deoxy-2'-fluorouridine-3'-phosphate
  modified_base 12: mod_base = OTHER; note = 2'-O-methyluridine-3'-phosphate
  modified_base 13: mod_base = OTHER; note = 2'-deoxy-2'-fluoroguanosine-3'-phosphate
  modified_base 14: mod_base = OTHER; note = 2'-O-methylcytidine-3'-phosphate
  modified_base 15: mod_base = OTHER; note = 2'-deoxy-2'-fluorouridine-3'-phosphate
  modified_base 16: mod_base = OTHER; note = 2'-O-methylcytidine-3'-phosphate
  modified_base 17: mod_base = OTHER; note = 1-deoxy-1-(thymin-1-yl)-alpha-L-threofuranose 2-phosphate
  modified_base 18: mod_base = OTHER; note = 2'-O-methyladenosine-3'-phosphate
  modified_base 19: mod_base = OTHER; note = 2'-deoxy-2'-fluorouridine-3'-phosphate
  modified_base 20: mod_base = OTHER; note = 2'-O-methyladenosine-3'-phosphate
  modified_base 21: mod_base = OTHER; note = 2'-deoxy-2'-fluoroadenosine-3'-phosphate conjugated at the 3'-end to an L96 ligand
aacagtgttcttgctctataa

SEQ ID NO: 499 - RNA, 21 nt, synthetic construct
  source 1..21: mol_type = other RNA
  modified_base 1: mod_base = OTHER; note = 2'-deoxy-2'-fluoroadenosine-3'-phosphorothioate
  modified_base 2: mod_base = OTHER; note = 2'-O-methyladenosine-3'-phosphorothioate
  modified_base 3: mod_base = OTHER; note = 2'-deoxy-2'-fluorocytidine-3'-phosphate
  modified_base 4: mod_base = OTHER; note = 2'-O-methyladenosine-3'-phosphate
  modified_base 5: mod_base = OTHER; note = 2'-deoxy-2'-fluoroguanosine-3'-phosphate
  modified_base 6: mod_base = OTHER; note = 2'-O-methyluridine-3'-phosphate
  modified_base 7: mod_base = OTHER; note = 2'-deoxy-2'-fluoroguanosine-3'-phosphate
  modified_base 8: mod_base = OTHER; note = 2'-O-methyluridine-3'-phosphate
  modified_base 9: mod_base = OTHER; note = 2'-deoxy-2'-fluorouridine-3'-phosphate
  modified_base 10: mod_base = OTHER; note = 2'-deoxy-2'-fluorocytidine-3'-phosphate
  modified_base 11: mod_base = OTHER; note = 2'-deoxy-2'-fluorouridine-3'-phosphate
  modified_base 12: mod_base = OTHER; note = 2'-O-methyluridine-3'-phosphate
  modified_base 13: mod_base = OTHER; note = 2'-deoxy-2'-fluoroguanosine-3'-phosphate
  modified_base 14: mod_base = OTHER; note = 2'-O-methylcytidine-3'-phosphate
  modified_base 15: mod_base = OTHER; note = 2'-deoxy-2'-fluorouridine-3'-phosphate
  modified_base 16: mod_base = OTHER; note = 2'-O-methylcytidine-3'-phosphate
  modified_base 17: mod_base = OTHER; note = 2'-deoxy-2'-fluorouridine-3'-phosphate
  modified_base 18: mod_base = OTHER; note = 1-deoxy-1-(adenin-9-yl)-alpha-L-threofuranose 2-phosphate
  modified_base 19: mod_base = OTHER; note = 2'-deoxy-2'-fluorouridine-3'-phosphate
  modified_base 20: mod_base = OTHER; note = 2'-O-methyladenosine-3'-phosphate
  modified_base 21: mod_base = OTHER; note = 2'-deoxy-2'-fluoroadenosine-3'-phosphate conjugated at the 3'-end to an L96 ligand
aacagtgttcttgctctataa

SEQ ID NO: 500 - RNA, 21 nt, synthetic construct
  source 1..21: mol_type = other RNA
  modified_base 1: mod_base = OTHER; note = 2'-deoxy-2'-fluoroadenosine-3'-phosphorothioate
  modified_base 2: mod_base = OTHER; note = 2'-O-methyladenosine-3'-phosphorothioate
  modified_base 3: mod_base = OTHER; note = 2'-deoxy-2'-fluorocytidine-3'-phosphate
  modified_base 4: mod_base = OTHER; note = 2'-O-methyladenosine-3'-phosphate
  modified_base 5: mod_base = OTHER; note = 2'-deoxy-2'-fluoroguanosine-3'-phosphate
  modified_base 6: mod_base = OTHER; note = 2'-O-methyluridine-3'-phosphate
  modified_base 7: mod_base = OTHER; note = 2'-deoxy-2'-fluoroguanosine-3'-phosphate
  modified_base 8: mod_base = OTHER; note = 2'-O-methyluridine-3'-phosphate
  modified_base 9: mod_base = OTHER; note = 2'-deoxy-2'-fluorouridine-3'-phosphate
  modified_base 10: mod_base = OTHER; note = 2'-deoxy-2'-fluorocytidine-3'-phosphate
  modified_base 11: mod_base = OTHER; note = 2'-deoxy-2'-fluorouridine-3'-phosphate
  modified_base 12: mod_base = OTHER; note = 2'-O-methyluridine-3'-phosphate
  modified_base 13: mod_base = OTHER; note = 2'-deoxy-2'-fluoroguanosine-3'-phosphate
  modified_base 14: mod_base = OTHER; note = 2'-O-methylcytidine-3'-phosphate
  modified_base 15: mod_base = OTHER; note = 2'-deoxy-2'-fluorouridine-3'-phosphate
  modified_base 16: mod_base = OTHER; note = 2'-O-methylcytidine-3'-phosphate
  modified_base 17: mod_base = OTHER; note = 2'-deoxy-2'-fluorouridine-3'-phosphate
  modified_base 18: mod_base = OTHER; note = 2'-O-methyladenosine-3'-phosphate
  modified_base 19: mod_base = OTHER; note = 1-deoxy-1-(thymin-1-yl)-alpha-L-threofuranose 2-phosphate
  modified_base 20: mod_base = OTHER; note = 2'-O-methyladenosine-3'-phosphate
  modified_base 21: mod_base = OTHER; note = 2'-deoxy-2'-fluoroadenosine-3'-phosphate conjugated at the 3'-end to an L96 ligand
aacagtgttcttgctctataa

SEQ ID NO: 501 - RNA, 21 nt, synthetic construct
  source 1..21: mol_type = other RNA
  modified_base 1: mod_base = OTHER; note = 2'-deoxy-2'-fluoroadenosine-3'-phosphorothioate
  modified_base 2: mod_base = OTHER; note = 2'-O-methyladenosine-3'-phosphorothioate
  modified_base 3: mod_base = OTHER; note = 2'-deoxy-2'-fluorocytidine-3'-phosphate
  modified_base 4: mod_base = OTHER; note = 2'-O-methyladenosine-3'-phosphate
  modified_base 5: mod_base = OTHER; note = 2'-deoxy-2'-fluoroguanosine-3'-phosphate
  modified_base 6: mod_base = OTHER; note = 2'-O-methyluridine-3'-phosphate
  modified_base 7: mod_base = OTHER; note = 2'-deoxy-2'-fluoroguanosine-3'-phosphate
  modified_base 8: mod_base = OTHER; note = 2'-O-methyluridine-3'-phosphate
  modified_base 9: mod_base = OTHER; note = 2'-deoxy-2'-fluorouridine-3'-phosphate
  modified_base 10: mod_base = OTHER; note = 2'-deoxy-2'-fluorocytidine-3'-phosphate
  modified_base 11: mod_base = OTHER; note = 2'-deoxy-2'-fluorouridine-3'-phosphate
  modified_base 12: mod_base = OTHER; note = 2'-O-methyluridine-3'-phosphate
  modified_base 13: mod_base = OTHER; note = 2'-deoxy-2'-fluoroguanosine-3'-phosphate
  modified_base 14: mod_base = OTHER; note = 2'-O-methylcytidine-3'-phosphate
  modified_base 15: mod_base = OTHER; note = 2'-deoxy-2'-fluorouridine-3'-phosphate
  modified_base 16: mod_base = OTHER; note = 2'-O-methylcytidine-3'-phosphate
  modified_base 17: mod_base = OTHER; note = 2'-deoxy-2'-fluorouridine-3'-phosphate
  modified_base 18: mod_base = OTHER; note = 2'-O-methyladenosine-3'-phosphate
  modified_base 19: mod_base = OTHER; note = 2'-deoxy-2'-fluorouridine-3'-phosphate
  modified_base 20: mod_base = OTHER; note = 1-deoxy-1-(adenin-9-yl)-alpha-L-threofuranose 2-phosphate
  modified_base 21: mod_base = OTHER; note = 2'-deoxy-2'-fluoroadenosine-3'-phosphate conjugated at the 3'-end to an L96 ligand
aacagtgttcttgctctataa

SEQ ID NO: 502 - RNA, 21 nt, synthetic construct
  source 1..21: mol_type = other RNA
  modified_base 1: mod_base = OTHER; note = 2'-deoxy-2'-fluoroadenosine-3'-phosphorothioate
  modified_base 2: mod_base = OTHER; note = 2'-O-methyladenosine-3'-phosphorothioate
  modified_base 3: mod_base = OTHER; note = 2'-deoxy-2'-fluorocytidine-3'-phosphate
  modified_base 4: mod_base = OTHER; note = 2'-O-methyladenosine-3'-phosphate
  modified_base 5: mod_base = OTHER; note = 2'-deoxy-2'-fluoroguanosine-3'-phosphate
  modified_base 6: mod_base = OTHER; note = 2'-O-methyluridine-3'-phosphate
  modified_base 7: mod_base = OTHER; note = 2'-deoxy-2'-fluoroguanosine-3'-phosphate
  modified_base 8: mod_base = OTHER; note = 2'-O-methyluridine-3'-phosphate
  modified_base 9: mod_base = OTHER; note = 2'-deoxy-2'-fluorouridine-3'-phosphate
  modified_base 10: mod_base = OTHER; note = 2'-deoxy-2'-fluorocytidine-3'-phosphate
  modified_base 11: mod_base = OTHER; note = 2'-deoxy-2'-fluorouridine-3'-phosphate
  modified_base 12: mod_base = OTHER; note = 2'-O-methyluridine-3'-phosphate
  modified_base 13: mod_base = OTHER; note = 2'-deoxy-2'-fluoroguanosine-3'-phosphate
  modified_base 14: mod_base = OTHER; note = 2'-O-methylcytidine-3'-phosphate
  modified_base 15: mod_base = OTHER; note = 2'-deoxy-2'-fluorouridine-3'-phosphate
  modified_base 16: mod_base = OTHER; note = 2'-O-methylcytidine-3'-phosphate
  modified_base 17: mod_base = OTHER; note = 2'-deoxy-2'-fluorouridine-3'-phosphate
  modified_base 18: mod_base = OTHER; note = 2'-O-methyladenosine-3'-phosphate
  modified_base 19: mod_base = OTHER; note = 2'-deoxy-2'-fluorouridine-3'-phosphate
  modified_base 20: mod_base = OTHER; note = 2'-O-methyladenosine-3'-phosphate
  modified_base 21: mod_base = OTHER; note = 1-deoxy-1-(adenin-9-yl)-alpha-L-threofuranose 2-phosphate conjugated at the 3'-end to an L96 ligand
aacagtgttcttgctctataa

SEQ ID NO: 503 - RNA, 21 nt, synthetic construct
  source 1..21: mol_type = other RNA
  modified_base 1: mod_base = OTHER; note = 2'-deoxy-2'-fluoroadenosine-3'-phosphorothioate
  modified_base 2: mod_base = OTHER; note = 2'-O-methyladenosine-3'-phosphorothioate
  modified_base 3: mod_base = OTHER; note = 2'-deoxy-2'-fluorocytidine-3'-phosphate
  modified_base 4: mod_base = OTHER; note = 2'-O-methyladenosine-3'-phosphate
  modified_base 5: mod_base = OTHER; note = 2'-deoxy-2'-fluoroguanosine-3'-phosphate
  modified_base 6: mod_base = OTHER; note = 2'-O-methyluridine-3'-phosphate
  modified_base 7: mod_base = OTHER; note = 2'-deoxy-2'-fluoroguanosine-3'-phosphate
  modified_base 8: mod_base = OTHER; note = 2'-O-methyluridine-3'-phosphate
  modified_base 9: mod_base = OTHER; note = 2'-deoxy-2'-fluorouridine-3'-phosphate
  modified_base 10: mod_base = OTHER; note = 2'-deoxy-2'-fluorocytidine-3'-phosphate
  modified_base 11: mod_base = OTHER; note = 2'-deoxy-2'-fluorouridine-3'-phosphate
  modified_base 12: mod_base = OTHER; note = 2'-O-methyluridine-3'-phosphate
  modified_base 13: mod_base = OTHER; note = 2'-deoxy-2'-fluoroguanosine-3'-phosphate
  modified_base 14: mod_base = OTHER; note = 2'-O-methylcytidine-3'-phosphate
  modified_base 15: mod_base = OTHER; note = 2'-deoxy-2'-fluorouridine-3'-phosphate
  modified_base 16: mod_base = OTHER; note = 2'-O-methylcytidine-3'-phosphate
  modified_base 17: mod_base = OTHER; note = 2'-deoxy-2'-fluorouridine-3'-phosphate
  modified_base 18: mod_base = OTHER; note = 2'-O-methyladenosine-3'-phosphate
  modified_base 19: mod_base = OTHER; note = 2'-deoxy-2'-fluorouridine-3'-phosphate
  modified_base 20: mod_base = OTHER; note = 2'-O-methyladenosine-3'-phosphate
  modified_base 21: mod_base = OTHER; note = 2'-deoxy-2'-fluoroadenosine-3'-phosphate conjugated at the 3'-end to an L96 ligand
aacagtgttcttgctctataa

SEQ ID NO: 504 - RNA, 21 nt, synthetic construct
  source 1..21: mol_type = other RNA
  modified_base 1: mod_base = OTHER; note = 2'-deoxy-2'-fluoroadenosine-3'-phosphorothioate
  modified_base 2: mod_base = OTHER; note = 2'-O-methyladenosine-3'-phosphorothioate
  modified_base 3: mod_base = OTHER; note = 2'-deoxy-2'-fluorocytidine-3'-phosphate
  modified_base 4: mod_base = OTHER; note = 2'-O-methyladenosine-3'-phosphate
  modified_base 5: mod_base = OTHER; note = 2'-deoxy-2'-fluoroguanosine-3'-phosphate
  modified_base 6: mod_base = OTHER; note = 2'-O-methyluridine-3'-phosphate
  modified_base 7: mod_base = OTHER; note = 2'-deoxy-2'-fluoroguanosine-3'-phosphate
  modified_base 8: mod_base = OTHER; note = 2'-O-methyluridine-3'-phosphate
  modified_base 9: mod_base = OTHER; note = 2'-deoxy-2'-fluorouridine-3'-phosphate
  modified_base 10: mod_base = OTHER; note = 2'-deoxy-2'-fluorocytidine-3'-phosphate
  modified_base 11: mod_base = OTHER; note = 2'-deoxy-2'-fluorouridine-3'-phosphate
  modified_base 12: mod_base = OTHER; note = 2'-O-methyluridine-3'-phosphate
  modified_base 13: mod_base = OTHER; note = 2'-deoxy-2'-fluoroguanosine-3'-phosphate
  modified_base 14: mod_base = OTHER; note = 2'-O-methylcytidine-3'-phosphate
  modified_base 15: mod_base = OTHER; note = 2'-deoxy-2'-fluorouridine-3'-phosphate
  modified_base 16: mod_base = OTHER; note = 2'-O-methylcytidine-3'-phosphate
  modified_base 17: mod_base = OTHER; note = 2'-deoxy-2'-fluorouridine-3'-phosphate
  modified_base 18: mod_base = OTHER; note = 2'-O-methyladenosine-3'-phosphate
  modified_base 19: mod_base = OTHER; note = 2'-deoxy-2'-fluorouridine-3'-phosphate
  modified_base 20: mod_base = OTHER; note = 2'-O-methyladenosine-3'-phosphate
  modified_base 21: mod_base = OTHER; note = 2'-deoxy-2'-fluoroadenosine-3'-phosphate conjugated at the 3'-end to an L96 ligand
aacagtgttcttgctctataa

SEQ ID NO: 505 - RNA, 21 nt, synthetic construct
  source 1..21: mol_type = other RNA
  modified_base 1: mod_base = OTHER; note = 2'-deoxy-2'-fluoroadenosine-3'-phosphorothioate
  modified_base 2: mod_base = OTHER; note = 2'-O-methyladenosine-3'-phosphorothioate
  modified_base 3: mod_base = OTHER; note = 2'-deoxy-2'-fluorocytidine-3'-phosphate
  modified_base 4: mod_base = OTHER; note = 2'-O-methyladenosine-3'-phosphate
  modified_base 5: mod_base = OTHER; note = 2'-deoxy-2'-fluoroguanosine-3'-phosphate
  modified_base 6: mod_base = OTHER; note = 2'-O-methyluridine-3'-phosphate
  modified_base 7: mod_base = OTHER; note = 2'-deoxy-2'-fluoroguanosine-3'-phosphate
  modified_base 8: mod_base = OTHER; note = 2'-O-methyluridine-3'-phosphate
  modified_base 9: mod_base = OTHER; note = 2'-deoxy-2'-fluorouridine-3'-phosphate
  modified_base 10: mod_base = OTHER; note = 2'-deoxy-2'-fluorocytidine-3'-phosphate
  modified_base 11: mod_base = OTHER; note = 2'-deoxy-2'-fluorouridine-3'-phosphate
  modified_base 12: mod_base = OTHER; note = 2'-O-methyluridine-3'-phosphate
  modified_base 13: mod_base = OTHER; note = 2'-deoxy-2'-fluoroguanosine-3'-phosphate
  modified_base 14: mod_base = OTHER; note = 2'-O-methylcytidine-3'-phosphate
  modified_base 15: mod_base = OTHER; note = 2'-deoxy-2'-fluorouridine-3'-phosphate
  modified_base 16: mod_base = OTHER; note = 2'-O-methylcytidine-3'-phosphate
  modified_base 17: mod_base = OTHER; note = 2'-deoxy-2'-fluorouridine-3'-phosphate
  modified_base 18: mod_base = OTHER; note = 2'-O-methyladenosine-3'-phosphate
  modified_base 19: mod_base = OTHER; note = 2'-deoxy-2'-fluorouridine-3'-phosphate
  modified_base 20: mod_base = OTHER; note = 2'-O-methyladenosine-3'-phosphate
  modified_base 21: mod_base = OTHER; note = 2'-deoxy-2'-fluoroadenosine-3'-phosphate conjugated at the 3'-end to an L96 ligand
aacagtgttcttgctctataa

SEQ ID NO: 506 - RNA, 21 nt, synthetic construct
  source 1..21: mol_type = other RNA
  modified_base 1: mod_base = OTHER; note = 2'-deoxy-2'-fluoroadenosine-3'-phosphorothioate
  modified_base 2: mod_base = OTHER; note = 2'-O-methyladenosine-3'-phosphorothioate
  modified_base 3: mod_base = OTHER; note = 2'-deoxy-2'-fluorocytidine-3'-phosphate
  modified_base 4: mod_base = OTHER; note = 2'-O-methyladenosine-3'-phosphate
  modified_base 5: mod_base = OTHER; note = 2'-deoxy-2'-fluoroguanosine-3'-phosphate
  modified_base 6: mod_base = OTHER; note = 2'-O-methyluridine-3'-phosphate
  modified_base 7: mod_base = OTHER; note = 2'-deoxy-2'-fluoroguanosine-3'-phosphate
  modified_base 8: mod_base = OTHER; note = 2'-O-methyluridine-3'-phosphate
  modified_base 9: mod_base = OTHER; note = 2'-deoxy-2'-fluorouridine-3'-phosphate
  modified_base 10: mod_base = OTHER; note = 2'-deoxy-2'-fluorocytidine-3'-phosphate
  modified_base 11: mod_base = OTHER; note = 2'-deoxy-2'-fluorouridine-3'-phosphate
  modified_base 12: mod_base = OTHER; note = 2'-O-methyluridine-3'-phosphate
  modified_base 13: mod_base = OTHER; note = 2'-deoxy-2'-fluoroguanosine-3'-phosphate
  modified_base 14: mod_base = OTHER; note = 2'-O-methylcytidine-3'-phosphate
  modified_base 15: mod_base = OTHER; note = 2'-deoxy-2'-fluorouridine-3'-phosphate
  modified_base 16: mod_base = OTHER; note = 2'-O-methylcytidine-3'-phosphate
  modified_base 17: mod_base = OTHER; note = 2'-deoxy-2'-fluorouridine-3'-phosphate
  modified_base 18: mod_base = OTHER; note = 2'-O-methyladenosine-3'-phosphate
  modified_base 19: mod_base = OTHER; note = 2'-deoxy-2'-fluorouridine-3'-phosphate
  modified_base 20: mod_base = OTHER; note = 2'-O-methyladenosine-3'-phosphate
  modified_base 21: mod_base = OTHER; note = 2'-deoxy-2'-fluoroadenosine-3'-phosphate conjugated at the 3'-end to an L96 ligand
aacagtgttcttgctctataa

SEQ ID NO: 507 - RNA, 21 nt, synthetic construct
  source 1..21: mol_type = other RNA
  modified_base 1: mod_base = OTHER; note = 2'-deoxy-2'-fluoroadenosine-3'-phosphorothioate
  modified_base 2: mod_base = OTHER; note = 2'-O-methyladenosine-3'-phosphorothioate
  modified_base 3: mod_base = OTHER; note = 2'-deoxy-2'-fluorocytidine-3'-phosphate
  modified_base 4: mod_base = OTHER; note = 2'-O-methyladenosine-3'-phosphate
  modified_base 5: mod_base = OTHER; note = 2'-deoxy-2'-fluoroguanosine-3'-phosphate
  modified_base 6: mod_base = OTHER; note = 2'-O-methyluridine-3'-phosphate
  modified_base 7: mod_base = OTHER; note = 2'-deoxy-2'-fluoroguanosine-3'-phosphate
  modified_base 8: mod_base = OTHER; note = 2'-O-methyluridine-3'-phosphate
  modified_base 9: mod_base = OTHER; note = 2'-deoxy-2'-fluorouridine-3'-phosphate
  modified_base 10: mod_base = OTHER; note = 2'-deoxy-2'-fluorocytidine-3'-phosphate
  modified_base 11: mod_base = OTHER; note = 2'-deoxy-2'-fluorouridine-3'-phosphate
  modified_base 12: mod_base = OTHER; note = 2'-O-methyluridine-3'-phosphate
  modified_base 13: mod_base = OTHER; note = 2'-deoxy-2'-fluoroguanosine-3'-phosphate
  modified_base 14: mod_base = OTHER; note = 2'-O-methylcytidine-3'-phosphate
  modified_base 15: mod_base = OTHER; note = 2'-deoxy-2'-fluorouridine-3'-phosphate
  modified_base 16: mod_base = OTHER; note = 2'-O-methylcytidine-3'-phosphate
  modified_base 17: mod_base = OTHER; note = 2'-deoxy-2'-fluorouridine-3'-phosphate
  modified_base 18: mod_base = OTHER; note = 2'-O-methyladenosine-3'-phosphate
  modified_base 19: mod_base = OTHER; note = 2'-deoxy-2'-fluorouridine-3'-phosphate
  modified_base 20: mod_base = OTHER; note = 2'-O-methyladenosine-3'-phosphate
  modified_base 21: mod_base = OTHER; note = 2'-deoxy-2'-fluoroadenosine-3'-phosphate conjugated at the 3'-end to an L96 ligand
aacagtgttcttgctctataa

SEQ ID NO: 508 - RNA, 21 nt, synthetic construct
  source 1..21: mol_type = other RNA
  modified_base 1: mod_base = OTHER; note = 2'-deoxy-2'-fluoroadenosine-3'-phosphorothioate
  modified_base 2: mod_base = OTHER; note = 2'-O-methyladenosine-3'-phosphorothioate
  modified_base 3: mod_base = OTHER; note = 2'-deoxy-2'-fluorocytidine-3'-phosphate
  modified_base 4: mod_base = OTHER; note = 2'-O-methyladenosine-3'-phosphate
  modified_base 5: mod_base = OTHER; note = 2'-deoxy-2'-fluoroguanosine-3'-phosphate
  modified_base 6: mod_base = OTHER; note = 2'-O-methyluridine-3'-phosphate
  modified_base 7: mod_base = OTHER; note = 2'-deoxy-2'-fluoroguanosine-3'-phosphate
  modified_base 8: mod_base = OTHER; note = 2'-O-methyluridine-3'-phosphate
  modified_base 9: mod_base = OTHER; note = 2'-deoxy-2'-fluorouridine-3'-phosphate
  modified_base 10: mod_base = OTHER; note = 2'-deoxy-2'-fluorocytidine-3'-phosphate
  modified_base 11: mod_base = OTHER; note = 2'-deoxy-2'-fluorouridine-3'-phosphate
  modified_base 12: mod_base = OTHER; note = 2'-O-methyluridine-3'-phosphate
  modified_base 13: mod_base = OTHER; note = 2'-deoxy-2'-fluoroguanosine-3'-phosphate
  modified_base 14: mod_base = OTHER; note = 2'-O-methylcytidine-3'-phosphate
  modified_base 15: mod_base = OTHER; note = 2'-deoxy-2'-fluorouridine-3'-phosphate
  modified_base 16: mod_base = OTHER; note = 2'-O-methylcytidine-3'-phosphate
  modified_base 17: mod_base = OTHER; note = 2'-deoxy-2'-fluorouridine-3'-phosphate
  modified_base 18: mod_base = OTHER; note = 2'-O-methyladenosine-3'-phosphate
  modified_base 19: mod_base = OTHER; note = 2'-deoxy-2'-fluorouridine-3'-phosphate
  modified_base 20: mod_base = OTHER; note = 2'-O-methyladenosine-3'-phosphate
  modified_base 21: mod_base = OTHER; note = 2'-deoxy-2'-fluoroadenosine-3'-phosphate conjugated at the 3'-end to an L96 ligand
aacagtgttcttgctctataa

SEQ ID NO: 509 - RNA, 21 nt, synthetic construct
  source 1..21: mol_type = other RNA
  modified_base 1: mod_base = OTHER; note = 2'-deoxy-2'-fluoroadenosine-3'-phosphorothioate
  modified_base 2: mod_base = OTHER; note = 2'-O-methyladenosine-3'-phosphorothioate
  modified_base 3: mod_base = OTHER; note = 2'-deoxy-2'-fluorocytidine-3'-phosphate
  modified_base 4: mod_base = OTHER; note = 2'-O-methyladenosine-3'-phosphate
  modified_base 5: mod_base = OTHER; note = 2'-deoxy-2'-fluoroguanosine-3'-phosphate
  modified_base 6: mod_base = OTHER; note = 2'-O-methyluridine-3'-phosphate
  modified_base 7: mod_base = OTHER; note = 2'-deoxy-2'-fluoroguanosine-3'-phosphate
  modified_base 8: mod_base = OTHER; note = 2'-O-methyluridine-3'-phosphate
  modified_base 9: mod_base = OTHER; note = 2'-deoxy-2'-fluorouridine-3'-phosphate
  modified_base 10: mod_base = OTHER; note = 2'-deoxy-2'-fluorocytidine-3'-phosphate
  modified_base 11: mod_base = OTHER; note = 2'-deoxy-2'-fluorouridine-3'-phosphate
  modified_base 12: mod_base = OTHER; note = 2'-O-methyluridine-3'-phosphate
  modified_base 13: mod_base = OTHER; note = 2'-deoxy-2'-fluoroguanosine-3'-phosphate
  modified_base 14: mod_base = OTHER; note = 2'-O-methylcytidine-3'-phosphate
  modified_base 15: mod_base = OTHER; note = 2'-deoxy-2'-fluorouridine-3'-phosphate
  modified_base 16: mod_base = OTHER; note = 2'-O-methylcytidine-3'-phosphate
  modified_base 17: mod_base = OTHER; note = 2'-deoxy-2'-fluorouridine-3'-phosphate
  modified_base 18: mod_base = OTHER; note = 2'-O-methyladenosine-3'-phosphate
  modified_base 19: mod_base = OTHER; note = 2'-deoxy-2'-fluorouridine-3'-phosphate
  modified_base 20: mod_base = OTHER; note = 2'-O-methyladenosine-3'-phosphate
  modified_base 21: mod_base = OTHER; note = 2'-deoxy-2'-fluoroadenosine-3'-phosphate conjugated at the 3'-end to an L96 ligand
aacagtgttcttgctctataa

SEQ ID NO: 510 - RNA, 21 nt, synthetic construct
  source 1..21: mol_type = other RNA
  modified_base 1: mod_base = OTHER; note = 2'-deoxy-2'-fluoroadenosine-3'-phosphorothioate
  modified_base 2: mod_base = OTHER; note = 2'-O-methyladenosine-3'-phosphorothioate
  modified_base 3: mod_base = OTHER; note = 2'-deoxy-2'-fluorocytidine-3'-phosphate
  modified_base 4: mod_base = OTHER; note = 2'-O-methyladenosine-3'-phosphate
  modified_base 5: mod_base = OTHER; note = 2'-deoxy-2'-fluoroguanosine-3'-phosphate
  modified_base 6: mod_base = OTHER; note = 2'-O-methyluridine-3'-phosphate
  modified_base 7: mod_base = OTHER; note = 2'-deoxy-2'-fluoroguanosine-3'-phosphate
  modified_base 8: mod_base = OTHER; note = 2'-O-methyluridine-3'-phosphate
  modified_base 9: mod_base = OTHER; note = 2'-deoxy-2'-fluorouridine-3'-phosphate
  modified_base 10: mod_base = OTHER; note = 2'-deoxy-2'-fluorocytidine-3'-phosphate
  modified_base 11: mod_base = OTHER; note = 2'-deoxy-2'-fluorouridine-3'-phosphate
  modified_base 12: mod_base = OTHER; note = 2'-O-methyluridine-3'-phosphate
  modified_base 13: mod_base = OTHER; note = 2'-deoxy-2'-fluoroguanosine-3'-phosphate
  modified_base 14: mod_base = OTHER; note = 2'-O-methylcytidine-3'-phosphate
  modified_base 15: mod_base = OTHER; note = 2'-deoxy-2'-fluorouridine-3'-phosphate
  modified_base 16: mod_base = OTHER; note = 2'-O-methylcytidine-3'-phosphate
  modified_base 17: mod_base = OTHER; note = 2'-deoxy-2'-fluorouridine-3'-phosphate
  modified_base 18: mod_base = OTHER; note = 2'-O-methyladenosine-3'-phosphate
  modified_base 19: mod_base = OTHER; note = 2'-deoxy-2'-fluorouridine-3'-phosphate
  modified_base 20: mod_base = OTHER; note = 2'-O-methyladenosine-3'-phosphate
  modified_base 21: mod_base = OTHER; note = 2'-deoxy-2'-fluoroadenosine-3'-phosphate conjugated at the 3'-end to an L96 ligand
aacagtgttcttgctctataa

SEQ ID NO: 511 - RNA, 21 nt, synthetic construct
  source 1..21: mol_type = other RNA
  modified_base 1: mod_base = OTHER; note = 2'-deoxy-2'-fluoroadenosine-3'-phosphorothioate
  modified_base 2: mod_base = OTHER; note = 2'-O-methyladenosine-3'-phosphorothioate
  modified_base 3: mod_base = OTHER; note = 2'-deoxy-2'-fluorocytidine-3'-phosphate
  modified_base 4: mod_base = OTHER; note = 2'-O-methyladenosine-3'-phosphate
  modified_base 5: mod_base = OTHER; note = 2'-deoxy-2'-fluoroguanosine-3'-phosphate
  modified_base 6: mod_base = OTHER; note = 2'-O-methyluridine-3'-phosphate
  modified_base 7: mod_base = OTHER; note = 2'-deoxy-2'-fluoroguanosine-3'-phosphate
  modified_base 8: mod_base = OTHER; note = 2'-O-methyluridine-3'-phosphate
  modified_base 9: mod_base = OTHER; note = 2'-deoxy-2'-fluorouridine-3'-phosphate
  modified_base 10: mod_base = OTHER; note = 2'-deoxy-2'-fluorocytidine-3'-phosphate
  modified_base 11: mod_base = OTHER; note = 2'-deoxy-2'-fluorouridine-3'-phosphate
  modified_base 12: mod_base = OTHER; note = 2'-O-methyluridine-3'-phosphate
  modified_base 13: mod_base = OTHER; note = 2'-deoxy-2'-fluoroguanosine-3'-phosphate
  modified_base 14: mod_base = OTHER; note = 2'-O-methylcytidine-3'-phosphate
  modified_base 15: mod_base = OTHER; note = 2'-deoxy-2'-fluorouridine-3'-phosphate
  modified_base 16: mod_base = OTHER; note = 2'-O-methylcytidine-3'-phosphate
  modified_base 17: mod_base = OTHER; note = 2'-deoxy-2'-fluorouridine-3'-phosphate
  modified_base 18: mod_base = OTHER; note = 2'-O-methyladenosine-3'-phosphate
  modified_base 19: mod_base = OTHER; note = 2'-deoxy-2'-fluorouridine-3'-phosphate
  modified_base 20: mod_base = OTHER; note = 2'-O-methyladenosine-3'-phosphate
  modified_base 21: mod_base = OTHER; note = 2'-deoxy-2'-fluoroadenosine-3'-phosphate conjugated at the 3'-end to an L96 ligand
aacagtgttcttgctctataa

SEQ ID NO: 512 - RNA, 21 nt, synthetic construct
  source 1..21: mol_type = other RNA
  modified_base 1: mod_base = OTHER; note = 2'-deoxy-2'-fluoroadenosine-3'-phosphorothioate
  modified_base 2: mod_base = OTHER; note = 2'-O-methyladenosine-3'-phosphorothioate
  modified_base 3: mod_base = OTHER; note = 2'-deoxy-2'-fluorocytidine-3'-phosphate
  modified_base 4: mod_base = OTHER; note = 2'-O-methyladenosine-3'-phosphate
  modified_base 5: mod_base = OTHER; note = 2'-deoxy-2'-fluoroguanosine-3'-phosphate
  modified_base 6: mod_base = OTHER; note = 2'-O-methyluridine-3'-phosphate
  modified_base 7: mod_base = OTHER; note = 2'-deoxy-2'-fluoroguanosine-3'-phosphate
  modified_base 8: mod_base = OTHER; note = 2'-O-methyluridine-3'-phosphate
  modified_base 9: mod_base = OTHER; note = 2'-deoxy-2'-fluorouridine-3'-phosphate
  modified_base 10: mod_base = OTHER; note = 2'-deoxy-2'-fluorocytidine-3'-phosphate
  modified_base 11: mod_base = OTHER; note = 2'-deoxy-2'-fluorouridine-3'-phosphate
  modified_base 12: mod_base = OTHER; note = 2'-O-methyluridine-3'-phosphate
  modified_base 13: mod_base = OTHER; note = 2'-deoxy-2'-fluoroguanosine-3'-phosphate
  modified_base 14: mod_base = OTHER; note = 2'-O-methylcytidine-3'-phosphate
  modified_base 15: mod_base = OTHER; note = 2'-deoxy-2'-fluorouridine-3'-phosphate
  modified_base 16: mod_base = OTHER; note = 2'-O-methylcytidine-3'-phosphate
  modified_base 17: mod_base = OTHER; note = 2'-deoxy-2'-fluorouridine-3'-phosphate
  modified_base 18: mod_base = OTHER; note = 2'-O-methyladenosine-3'-phosphate
  modified_base 19: mod_base = OTHER; note = 2'-deoxy-2'-fluorouridine-3'-phosphate
  modified_base 20: mod_base = OTHER; note = 2'-O-methyladenosine-3'-phosphate
  modified_base 21: mod_base = OTHER; note = 2'-deoxy-2'-fluoroadenosine-3'-phosphate conjugated at the 3'-end to an L96 ligand
aacagtgttcttgctctataa

SEQ ID NO: 513 - RNA, 21 nt, synthetic construct
  source 1..21: mol_type = other RNA
  modified_base 1: mod_base = OTHER; note = 2'-deoxy-2'-fluoroadenosine-3'-phosphorothioate
  modified_base 2: mod_base = OTHER; note = 2'-O-methyladenosine-3'-phosphorothioate
  modified_base 3: mod_base = OTHER; note = 2'-deoxy-2'-fluorocytidine-3'-phosphate
  modified_base 4: mod_base = OTHER; note = 2'-O-methyladenosine-3'-phosphate
  modified_base 5: mod_base = OTHER; note = 2'-deoxy-2'-fluoroguanosine-3'-phosphate
  modified_base 6: mod_base = OTHER; note = 2'-O-methyluridine-3'-phosphate
  modified_base 7: mod_base = OTHER; note = 2'-deoxy-2'-fluoroguanosine-3'-phosphate
  modified_base 8: mod_base = OTHER; note = 2'-O-methyluridine-3'-phosphate
  modified_base 9: mod_base = OTHER; note = 2'-deoxy-2'-fluorouridine-3'-phosphate
  modified_base 10: mod_base = OTHER; note = 2'-deoxy-2'-fluorocytidine-3'-phosphate
  modified_base 11: mod_base = OTHER; note = 2'-deoxy-2'-fluorouridine-3'-phosphate
  modified_base 12: mod_base = OTHER; note = 2'-O-methyluridine-3'-phosphate
  modified_base 13: mod_base = OTHER; note = 2'-deoxy-2'-fluoroguanosine-3'-phosphate
  modified_base 14: mod_base = OTHER; note = 2'-O-methylcytidine-3'-phosphate
  modified_base 15: mod_base = OTHER; note = 2'-deoxy-2'-fluorouridine-3'-phosphate
  modified_base 16: mod_base = OTHER; note = 2'-O-methylcytidine-3'-phosphate
  modified_base 17: mod_base = OTHER; note = 2'-deoxy-2'-fluorouridine-3'-phosphate
  modified_base 18: mod_base = OTHER; note = 2'-O-methyladenosine-3'-phosphate
  modified_base 19: mod_base = OTHER; note = 2'-deoxy-2'-fluorouridine-3'-phosphate
  modified_base 20: mod_base = OTHER; note = 2'-O-methyladenosine-3'-phosphate
  modified_base 21: mod_base = OTHER; note = 2'-deoxy-2'-fluoroadenosine-3'-phosphate conjugated at the 3'-end to an L96 ligand
aacagtgttcttgctctataa

SEQ ID NO: 514 - RNA, 21 nt, synthetic construct
  source 1..21: mol_type = other RNA
  modified_base 1: mod_base = OTHER; note = 2'-deoxy-2'-fluoroadenosine-3'-phosphorothioate
  modified_base 2: mod_base = OTHER; note = 2'-O-methyladenosine-3'-phosphorothioate
  modified_base 3: mod_base = OTHER; note = 2'-deoxy-2'-fluorocytidine-3'-phosphate
  modified_base 4: mod_base = OTHER; note = 2'-O-methyladenosine-3'-phosphate
  modified_base 5: mod_base = OTHER; note = 2'-deoxy-2'-fluoroguanosine-3'-phosphate
  modified_base 6: mod_base = OTHER; note = 2'-O-methyluridine-3'-phosphate
  modified_base 7: mod_base = OTHER; note = 2'-deoxy-2'-fluoroguanosine-3'-phosphate
  modified_base 8: mod_base = OTHER; note = 2'-O-methyluridine-3'-phosphate
  modified_base 9: mod_base = OTHER; note = 2'-deoxy-2'-fluorouridine-3'-phosphate
  modified_base 10: mod_base = OTHER; note = 2'-deoxy-2'-fluorocytidine-3'-phosphate
  modified_base 11: mod_base = OTHER; note = 2'-deoxy-2'-fluorouridine-3'-phosphate
  modified_base 12: mod_base = OTHER; note = 2'-O-methyluridine-3'-phosphate
  modified_base 13: mod_base = OTHER; note = 2'-deoxy-2'-fluoroguanosine-3'-phosphate
  modified_base 14: mod_base = OTHER; note = 2'-O-methylcytidine-3'-phosphate
  modified_base 15: mod_base = OTHER; note = 2'-deoxy-2'-fluorouridine-3'-phosphate
  modified_base 16: mod_base = OTHER; note = 2'-O-methylcytidine-3'-phosphate
  modified_base 17: mod_base = OTHER; note = 2'-deoxy-2'-fluorouridine-3'-phosphate
  modified_base 18: mod_base = OTHER; note = 2'-O-methyladenosine-3'-phosphate
  modified_base 19: mod_base = OTHER; note = 2'-deoxy-2'-fluorouridine-3'-phosphate
  modified_base 20: mod_base = OTHER; note = 2'-O-methyladenosine-3'-phosphate
  modified_base 21: mod_base = OTHER; note = 2'-deoxy-2'-fluoroadenosine-3'-phosphate conjugated at the 3'-end to an L96 ligand
aacagtgttcttgctctataa

SEQ ID NO: 515 - RNA, 21 nt, synthetic construct
  source 1..21: mol_type = other RNA
  modified_base 1: mod_base = OTHER; note = 2'-deoxy-2'-fluoroadenosine-3'-phosphorothioate
  modified_base 2: mod_base = OTHER; note = 2'-O-methyladenosine-3'-phosphorothioate
  modified_base 3: mod_base = OTHER; note = 2'-deoxy-2'-fluorocytidine-3'-phosphate
  modified_base 4: mod_base = OTHER; note = 2'-O-methyladenosine-3'-phosphate
  modified_base 5: mod_base = OTHER; note = 2'-deoxy-2'-fluoroguanosine-3'-phosphate
  modified_base 6: mod_base = OTHER; note = 2'-O-methyluridine-3'-phosphate
  modified_base 7: mod_base = OTHER; note = 2'-deoxy-2'-fluoroguanosine-3'-phosphate
  modified_base 8: mod_base = OTHER; note = 2'-O-methyluridine-3'-phosphate
  modified_base 9: mod_base = OTHER; note = 2'-deoxy-2'-fluorouridine-3'-phosphate
  modified_base 10: mod_base = OTHER; note = 2'-deoxy-2'-fluorocytidine-3'-phosphate
  modified_base 11: mod_base = OTHER; note = 2'-deoxy-2'-fluorouridine-3'-phosphate
  modified_base 12: mod_base = OTHER; note = 2'-O-methyluridine-3'-phosphate
  modified_base 13: mod_base = OTHER; note = 2'-deoxy-2'-fluoroguanosine-3'-phosphate
  modified_base 14: mod_base = OTHER; note = 2'-O-methylcytidine-3'-phosphate
  modified_base 15: mod_base = OTHER; note = 2'-deoxy-2'-fluorouridine-3'-phosphate
  modified_base 16: mod_base = OTHER; note = 2'-O-methylcytidine-3'-phosphate
  modified_base 17: mod_base = OTHER; note = 2'-deoxy-2'-fluorouridine-3'-phosphate
  modified_base 18: mod_base = OTHER; note = 2'-O-methyladenosine-3'-phosphate
  modified_base 19: mod_base = OTHER; note = 2'-deoxy-2'-fluorouridine-3'-phosphate
  modified_base 20: mod_base = OTHER; note = 2'-O-methyladenosine-3'-phosphate
  modified_base 21: mod_base = OTHER; note = 2'-deoxy-2'-fluoroadenosine-3'-phosphate conjugated at the 3'-end to an L96 ligand
aacagtgttcttgctctataa

SEQ ID NO: 516 - RNA, 21 nt, synthetic construct
  source 1..21: mol_type = other RNA
  modified_base 1: mod_base = OTHER; note = 2'-deoxy-2'-fluoroadenosine-3'-phosphorothioate
  modified_base 2: mod_base = OTHER; note = 2'-O-methyladenosine-3'-phosphorothioate
  modified_base 3: mod_base = OTHER; note = 2'-deoxy-2'-fluorocytidine-3'-phosphate
  modified_base 4: mod_base = OTHER; note = 2'-O-methyladenosine-3'-phosphate
  modified_base 5: mod_base = OTHER; note = 2'-deoxy-2'-fluoroguanosine-3'-phosphate
  modified_base 6: mod_base = OTHER; note = 2'-O-methyluridine-3'-phosphate
  modified_base 7: mod_base = OTHER; note = 2'-deoxy-2'-fluoroguanosine-3'-phosphate
  modified_base 8: mod_base = OTHER; note = 2'-O-methyluridine-3'-phosphate
  modified_base 9: mod_base = OTHER; note = 2'-deoxy-2'-fluorouridine-3'-phosphate
  modified_base 10: mod_base = OTHER; note = 2'-deoxy-2'-fluorocytidine-3'-phosphate
  modified_base 11: mod_base = OTHER; note = 2'-deoxy-2'-fluorouridine-3'-phosphate
  modified_base 12: mod_base = OTHER; note = 2'-O-methyluridine-3'-phosphate
  modified_base 13: mod_base = OTHER; note = 2'-deoxy-2'-fluoroguanosine-3'-phosphate
  modified_base 14: mod_base = OTHER; note = 2'-O-methylcytidine-3'-phosphate
  modified_base 15: mod_base = OTHER; note = 2'-deoxy-2'-fluorouridine-3'-phosphate
  modified_base 16: mod_base = OTHER; note = 2'-O-methylcytidine-3'-phosphate
  modified_base 17: mod_base = OTHER; note = 2'-deoxy-2'-fluorouridine-3'-phosphate
  modified_base 18: mod_base = OTHER; note = 2'-O-methyladenosine-3'-phosphate
  modified_base 19: mod_base = OTHER; note = 2'-deoxy-2'-fluorouridine-3'-phosphate
  modified_base 20: mod_base = OTHER; note = 2'-O-methyladenosine-3'-phosphate
  modified_base 21: mod_base = OTHER; note = 2'-deoxy-2'-fluoroadenosine-3'-phosphate conjugated at the 3'-end to an L96 ligand
aacagtgttcttgctctataa

SEQ ID NO: 517 - RNA, 21 nt, synthetic construct
  source 1..21: mol_type = other RNA
  modified_base 1: mod_base = OTHER; note = 2'-deoxy-2'-fluoroadenosine-3'-phosphorothioate
  modified_base 2: mod_base = OTHER; note = 2'-O-methyladenosine-3'-phosphorothioate
  modified_base 3: mod_base = OTHER; note = 2'-deoxy-2'-fluorocytidine-3'-phosphate
  modified_base 4: mod_base = OTHER; note = 2'-O-methyladenosine-3'-phosphate
  modified_base 5: mod_base = OTHER; note = 2'-deoxy-2'-fluoroguanosine-3'-phosphate
  modified_base 6: mod_base = OTHER; note = 2'-O-methyluridine-3'-phosphate
  modified_base 7: mod_base = OTHER; note = 2'-deoxy-2'-fluoroguanosine-3'-phosphate
  modified_base 8: mod_base = OTHER; note = 2'-O-methyluridine-3'-phosphate
  modified_base 9: mod_base = OTHER; note = 2'-deoxy-2'-fluorouridine-3'-phosphate
  modified_base 10: mod_base = OTHER; note = 2'-deoxy-2'-fluorocytidine-3'-phosphate
  modified_base 11: mod_base = OTHER; note = 2'-deoxy-2'-fluorouridine-3'-phosphate
  modified_base 12: mod_base = OTHER; note = 2'-O-methyluridine-3'-phosphate
  modified_base 13: mod_base = OTHER; note = 2'-deoxy-2'-fluoroguanosine-3'-phosphate
  modified_base 14: mod_base = OTHER; note = 2'-O-methylcytidine-3'-phosphate
  modified_base 15: mod_base = OTHER; note = 2'-deoxy-2'-fluorouridine-3'-phosphate
  modified_base 16: mod_base = OTHER; note = 2'-O-methylcytidine-3'-phosphate
  modified_base 17: mod_base = OTHER; note = 2'-deoxy-2'-fluorouridine-3'-phosphate
  modified_base 18: mod_base = OTHER; note = 2'-O-methyladenosine-3'-phosphate
  modified_base 19: mod_base = OTHER; note = 2'-deoxy-2'-fluorouridine-3'-phosphate
  modified_base 20: mod_base = OTHER; note = 2'-O-methyladenosine-3'-phosphate
  modified_base 21: mod_base = OTHER; note = 2'-deoxy-2'-fluoroadenosine-3'-phosphate conjugated at the 3'-end to an L96 ligand
aacagtgttcttgctctataa

SEQ ID NO: 518 - RNA, 21 nt, synthetic construct
  source 1..21: mol_type = other RNA
  modified_base 1: mod_base = OTHER; note = 2'-deoxy-2'-fluoroadenosine-3'-phosphorothioate
  modified_base 2: mod_base = OTHER; note = 2'-O-methyladenosine-3'-phosphorothioate
  modified_base 3: mod_base = OTHER; note = 2'-deoxy-2'-fluorocytidine-3'-phosphate
  modified_base 4: mod_base = OTHER; note = 2'-O-methyladenosine-3'-phosphate
  modified_base 5: mod_base = OTHER; note = 2'-deoxy-2'-fluoroguanosine-3'-phosphate
  modified_base 6: mod_base = OTHER; note = 2'-O-methyluridine-3'-phosphate
  modified_base 7: mod_base = OTHER; note = 2'-deoxy-2'-fluoroguanosine-3'-phosphate
  modified_base 8: mod_base = OTHER; note = 2'-O-methyluridine-3'-phosphate
  modified_base 9: mod_base = OTHER; note = 2'-deoxy-2'-fluorouridine-3'-phosphate
  modified_base 10: mod_base = OTHER; note = 2'-deoxy-2'-fluorocytidine-3'-phosphate
  modified_base 11: mod_base = OTHER; note = 2'-deoxy-2'-fluorouridine-3'-phosphate
  modified_base 12: mod_base = OTHER; note = 2'-O-methyluridine-3'-phosphate
  modified_base 13: mod_base = OTHER; note = 2'-deoxy-2'-fluoroguanosine-3'-phosphate
  modified_base 14: mod_base = OTHER; note = 2'-O-methylcytidine-3'-phosphate
  modified_base 15: mod_base = OTHER; note = 2'-deoxy-2'-fluorouridine-3'-phosphate
  modified_base 16: mod_base = OTHER; note = 2'-O-methylcytidine-3'-phosphate
  modified_base 17: mod_base = OTHER; note = 2'-deoxy-2'-fluorouridine-3'-phosphate
  modified_base 18: mod_base = OTHER; note = 2'-O-methyladenosine-3'-phosphate
  modified_base 19: mod_base = OTHER; note = 2'-deoxy-2'-fluorouridine-3'-phosphate
  modified_base 20: mod_base = OTHER; note = 2'-O-methyladenosine-3'-phosphate
  modified_base 21: mod_base = OTHER; note = 2'-deoxy-2'-fluoroadenosine-3'-phosphate conjugated at the 3'-end to an L96 ligand
aacagtgttcttgctctataa

SEQ ID NO: 519 - RNA, 21 nt, synthetic construct
  source 1..21: mol_type = other RNA
  modified_base 1: mod_base = OTHER; note = 2'-deoxy-2'-fluoroadenosine-3'-phosphorothioate
  modified_base 2: mod_base = OTHER; note = 2'-O-methyladenosine-3'-phosphorothioate
  modified_base 3: mod_base = OTHER; note = 2'-deoxy-2'-fluorocytidine-3'-phosphate
  modified_base 4: mod_base = OTHER; note = 2'-O-methyladenosine-3'-phosphate
  modified_base 5: mod_base = OTHER; note = 2'-deoxy-2'-fluoroguanosine-3'-phosphate
  modified_base 6: mod_base = OTHER; note = 2'-O-methyluridine-3'-phosphate
  modified_base 7: mod_base = OTHER; note = 2'-deoxy-2'-fluoroguanosine-3'-phosphate
  modified_base 8: mod_base = OTHER; note = 2'-O-methyluridine-3'-phosphate
  modified_base 9: mod_base = OTHER; note = 2'-deoxy-2'-fluorouridine-3'-phosphate
  modified_base 10: mod_base = OTHER; note = 2'-deoxy-2'-fluorocytidine-3'-phosphate
  modified_base 11: mod_base = OTHER; note = 2'-deoxy-2'-fluorouridine-3'-phosphate
  modified_base 12: mod_base = OTHER; note = 2'-O-methyluridine-3'-phosphate
  modified_base 13: mod_base = OTHER; note = 2'-deoxy-2'-fluoroguanosine-3'-phosphate
  modified_base 14: mod_base = OTHER; note = 2'-O-methylcytidine-3'-phosphate
  modified_base 15: mod_base = OTHER; note = 2'-deoxy-2'-fluorouridine-3'-phosphate
  modified_base 16: mod_base = OTHER; note = 2'-O-methylcytidine-3'-phosphate
  modified_base 17: mod_base = OTHER; note = 2'-deoxy-2'-fluorouridine-3'-phosphate
  modified_base 18: mod_base = OTHER; note = 2'-O-methyladenosine-3'-phosphate
  modified_base 19: mod_base = OTHER; note = 2'-deoxy-2'-fluorouridine-3'-phosphate
  modified_base 20: mod_base = OTHER; note = 2'-O-methyladenosine-3'-phosphate
  modified_base 21: mod_base = OTHER; note = 2'-deoxy-2'-fluoroadenosine-3'-phosphate conjugated at the 3'-end to an L96 ligand
aacagtgttcttgctctataa

SEQ ID NO: 520 - RNA, 21 nt, synthetic construct
  source 1..21: mol_type = other RNA
  modified_base 1: mod_base = OTHER; note = 2'-deoxy-2'-fluoroadenosine-3'-phosphorothioate
  modified_base 2: mod_base = OTHER; note = 2'-O-methyladenosine-3'-phosphorothioate
  modified_base 3: mod_base = OTHER; note = 2'-deoxy-2'-fluorocytidine-3'-phosphate
  modified_base 4: mod_base = OTHER; note = 2'-O-methyladenosine-3'-phosphate
  modified_base 5: mod_base = OTHER; note = 2'-deoxy-2'-fluoroguanosine-3'-phosphate
  modified_base 6: mod_base = OTHER; note = 2'-O-methyluridine-3'-phosphate
  modified_base 7: mod_base = OTHER; note = 2'-deoxy-2'-fluoroguanosine-3'-phosphate
  modified_base 8: mod_base = OTHER; note = 2'-O-methyluridine-3'-phosphate
  modified_base 9: mod_base = OTHER; note = 2'-deoxy-2'-fluorouridine-3'-phosphate
  modified_base 10: mod_base = OTHER; note = 2'-deoxy-2'-fluorocytidine-3'-phosphate
  modified_base 11: mod_base = OTHER; note = 2'-deoxy-2'-fluorouridine-3'-phosphate
  modified_base 12: mod_base = OTHER; note = 2'-O-methyluridine-3'-phosphate
  modified_base 13: mod_base = OTHER; note = 2'-deoxy-2'-fluoroguanosine-3'-phosphate
  modified_base 14: mod_base = OTHER; note = 2'-O-methylcytidine-3'-phosphate
  modified_base 15: mod_base = OTHER; note = 2'-deoxy-2'-fluorouridine-3'-phosphate
  modified_base 16: mod_base = OTHER; note = 2'-O-methylcytidine-3'-phosphate
  modified_base 17: mod_base = OTHER; note = 2'-deoxy-2'-fluorouridine-3'-phosphate
  modified_base 18: mod_base = OTHER; note = 2'-O-methyladenosine-3'-phosphate
  modified_base 19: mod_base = OTHER; note = 2'-deoxy-2'-fluorouridine-3'-phosphate
  modified_base 20: mod_base = OTHER; note = 2'-O-methyladenosine-3'-phosphate
  modified_base 21: mod_base = OTHER; note = 2'-deoxy-2'-fluoroadenosine-3'-phosphate conjugated at the 3'-end to an L96 ligand
aacagtgttcttgctctataa

SEQ ID NO: 521 - RNA, 21 nt, synthetic construct
  source 1..21: mol_type = other RNA
  modified_base 1: mod_base = OTHER; note = 2'-deoxy-2'-fluoroadenosine-3'-phosphorothioate
  modified_base 2: mod_base = OTHER; note = 2'-O-methyladenosine-3'-phosphorothioate
  modified_base 3: mod_base = OTHER; note = 2'-deoxy-2'-fluorocytidine-3'-phosphate
  modified_base 4: mod_base = OTHER; note = 2'-O-methyladenosine-3'-phosphate
  modified_base 5: mod_base = OTHER; note = 2'-deoxy-2'-fluoroguanosine-3'-phosphate
  modified_base 6: mod_base = OTHER; note = 2'-O-methyluridine-3'-phosphate
  modified_base 7: mod_base = OTHER; note = 2'-deoxy-2'-fluoroguanosine-3'-phosphate
  modified_base 8: mod_base = OTHER; note = 2'-O-methyluridine-3'-phosphate
  modified_base 9: mod_base = OTHER; note = 2'-deoxy-2'-fluorouridine-3'-phosphate
  modified_base 10: mod_base = OTHER; note = 2'-deoxy-2'-fluorocytidine-3'-phosphate
  modified_base 11: mod_base = OTHER; note = 2'-deoxy-2'-fluorouridine-3'-phosphate
  modified_base 12: mod_base = OTHER; note = 2'-O-methyluridine-3'-phosphate
  modified_base 13: mod_base = OTHER; note = 2'-deoxy-2'-fluoroguanosine-3'-phosphate
  modified_base 14: mod_base = OTHER; note = 2'-O-methylcytidine-3'-phosphate
  modified_base 15: mod_base = OTHER; note = 2'-deoxy-2'-fluorouridine-3'-phosphate
  modified_base 16: mod_base = OTHER; note = 2'-O-methylcytidine-3'-phosphate
  modified_base 17: mod_base = OTHER; note = 2'-deoxy-2'-fluorouridine-3'-phosphate
  modified_base 18: mod_base = OTHER; note = 2'-O-methyladenosine-3'-phosphate
  modified_base 19: mod_base = OTHER; note = 2'-deoxy-2'-fluorouridine-3'-phosphate
  modified_base 20: mod_base = OTHER; note = 2'-O-methyladenosine-3'-phosphate
  modified_base 21: mod_base = OTHER; note = 2'-deoxy-2'-fluoroadenosine-3'-phosphate conjugated at the 3'-end to an L96 ligand
aacagtgttcttgctctataa

SEQ ID NO: 522 - RNA, 21 nt, synthetic construct
  source 1..21: mol_type = other RNA
  modified_base 1: mod_base = OTHER; note = 2'-deoxy-2'-fluoroadenosine-3'-phosphorothioate
  modified_base 2: mod_base = OTHER; note = 2'-O-methyladenosine-3'-phosphorothioate
  modified_base 3: mod_base = OTHER; note = 2'-deoxy-2'-fluorocytidine-3'-phosphate
  modified_base 4: mod_base = OTHER; note = 2'-O-methyladenosine-3'-phosphate
  modified_base 5: mod_base = OTHER; note = 2'-deoxy-2'-fluoroguanosine-3'-phosphate
  modified_base 6: mod_base = OTHER; note = 2'-O-methyluridine-3'-phosphate
  modified_base 7: mod_base = OTHER; note = 2'-deoxy-2'-fluoroguanosine-3'-phosphate
  modified_base 8: mod_base = OTHER; note = 2'-O-methyluridine-3'-phosphate
  modified_base 9: mod_base = OTHER; note = 2'-deoxy-2'-fluorouridine-3'-phosphate
  modified_base 10: mod_base = OTHER; note = 2'-deoxy-2'-fluorocytidine-3'-phosphate
  modified_base 11: mod_base = OTHER; note = 2'-deoxy-2'-fluorouridine-3'-phosphate
  modified_base 12: mod_base = OTHER; note = 2'-O-methyluridine-3'-phosphate
  modified_base 13: mod_base = OTHER; note = 2'-deoxy-2'-fluoroguanosine-3'-phosphate
  modified_base 14: mod_base = OTHER; note = 2'-O-methylcytidine-3'-phosphate
  modified_base 15: mod_base = OTHER; note = 2'-deoxy-2'-fluorouridine-3'-phosphate
  modified_base 16: mod_base = OTHER; note = 2'-O-methylcytidine-3'-phosphate
  modified_base 17: mod_base = OTHER; note = 2'-deoxy-2'-fluorouridine-3'-phosphate
  modified_base 18: mod_base = OTHER; note = 2'-O-methyladenosine-3'-phosphate
  modified_base 19: mod_base = OTHER; note = 2'-deoxy-2'-fluorouridine-3'-phosphate
  modified_base 20: mod_base = OTHER; note = 2'-O-methyladenosine-3'-phosphate
  modified_base 21: mod_base = OTHER; note = 2'-deoxy-2'-fluoroadenosine-3'-phosphate conjugated at the 3'-end to an L96 ligand
aacagtgttcttgctctataa

SEQ ID NO: 523 - RNA, 21 nt, synthetic construct
  source 1..21: mol_type = other RNA
  modified_base 1: mod_base = OTHER; note = 2'-deoxy-2'-fluoroadenosine-3'-phosphorothioate
  modified_base 2: mod_base = OTHER; note = 2'-O-methyladenosine-3'-phosphorothioate
  modified_base 3: mod_base = OTHER; note = 2'-deoxy-2'-fluorocytidine-3'-phosphate
  modified_base 4: mod_base = OTHER; note = 2'-O-methyladenosine-3'-phosphate
  modified_base 5: mod_base = OTHER; note = 2'-deoxy-2'-fluoroguanosine-3'-phosphate
  modified_base 6: mod_base = OTHER; note = 2'-O-methyluridine-3'-phosphate
  modified_base 7: mod_base = OTHER; note = 2'-deoxy-2'-fluoroguanosine-3'-phosphate
  modified_base 8: mod_base = OTHER; note = 2'-O-methyluridine-3'-phosphate
  modified_base 9: mod_base = OTHER; note = 2'-deoxy-2'-fluorouridine-3'-phosphate
  modified_base 10: mod_base = OTHER; note = 2'-deoxy-2'-fluorocytidine-3'-phosphate
  modified_base 11: mod_base = OTHER; note = 2'-deoxy-2'-fluorouridine-3'-phosphate
  modified_base 12: mod_base = OTHER; note = 2'-O-methyluridine-3'-phosphate
  modified_base 13: mod_base = OTHER; note = 2'-deoxy-2'-fluoroguanosine-3'-phosphate
  modified_base 14: mod_base = OTHER; note = 2'-O-methylcytidine-3'-phosphate
  modified_base 15: mod_base = OTHER; note = 2'-deoxy-2'-fluorouridine-3'-phosphate
  modified_base 16: mod_base = OTHER; note = 2'-O-methylcytidine-3'-phosphate
  modified_base 17: mod_base = OTHER; note = 2'-deoxy-2'-fluorouridine-3'-phosphate
  modified_base 18: mod_base = OTHER; note = 2'-O-methyladenosine-3'-phosphate
  modified_base 19: mod_base = OTHER; note = 2'-deoxy-2'-fluorouridine-3'-phosphate
  modified_base 20: mod_base = OTHER; note = 2'-O-methyladenosine-3'-phosphate
  modified_base 21: mod_base = OTHER; note = 2'-deoxy-2'-fluoroadenosine-3'-phosphate conjugated at the 3'-end to an L96 ligand
aacagtgttcttgctctataa

SEQ ID NO: 524 - RNA, 21 nt, synthetic construct
  source 1..21: mol_type = other RNA
  modified_base 1: mod_base = OTHER; note = 2'-deoxy-2'-fluoroadenosine-3'-phosphorothioate
  modified_base 2: mod_base = OTHER; note = 2'-O-methyladenosine-3'-phosphorothioate
  modified_base 3: mod_base = OTHER; note = 2'-deoxy-2'-fluorocytidine-3'-phosphate
  modified_base 4: mod_base = OTHER; note = 2'-O-methyladenosine-3'-phosphate
  modified_base 5: mod_base = OTHER; note = 2'-deoxy-2'-fluoroguanosine-3'-phosphate
  modified_base 6: mod_base = OTHER; note = 2'-O-methyluridine-3'-phosphate
  modified_base 7: mod_base = OTHER; note = 2'-deoxy-2'-fluoroguanosine-3'-phosphate
  modified_base 8: mod_base = OTHER; note = 2'-O-methyluridine-3'-phosphate
  modified_base 9: mod_base = OTHER; note = 2'-deoxy-2'-fluorouridine-3'-phosphate
  modified_base 10: mod_base = OTHER; note = 2'-deoxy-2'-fluorocytidine-3'-phosphate
  modified_base 11: mod_base = OTHER; note = 2'-deoxy-2'-fluorouridine-3'-phosphate
  modified_base 12: mod_base = OTHER; note = 2'-O-methyluridine-3'-phosphate
  modified_base 13: mod_base = OTHER; note = 2'-deoxy-2'-fluoroguanosine-3'-phosphate
  modified_base 14: mod_base = OTHER; note = 2'-O-methylcytidine-3'-phosphate
  modified_base 15: mod_base = OTHER; note = 2'-deoxy-2'-fluorouridine-3'-phosphate
  modified_base 16: mod_base = OTHER; note = 2'-O-methylcytidine-3'-phosphate
  modified_base 17: mod_base = OTHER; note = 2'-deoxy-2'-fluorouridine-3'-phosphate
  modified_base 18: mod_base = OTHER; note = 2'-O-methyladenosine-3'-phosphate
  modified_base 19: mod_base = OTHER; note = 2'-deoxy-2'-fluorouridine-3'-phosphate
  modified_base 20: mod_base = OTHER; note = 2'-O-methyladenosine-3'-phosphate
  modified_base 21: mod_base = OTHER; note = 2'-deoxy-2'-fluoroadenosine-3'-phosphate conjugated at the 3'-end to an L96 ligand
aacagtgttcttgctctataa

SEQ ID NO: 525 - RNA, 21 nt, synthetic construct
  source 1..21: mol_type = other RNA
  modified_base 1: mod_base = OTHER; note = 2'-deoxy-2'-fluoroadenosine-3'-phosphorothioate
  modified_base 2: mod_base = OTHER; note = 2'-O-methyladenosine-3'-phosphorothioate
  modified_base 3: mod_base = OTHER; note = 2'-deoxy-2'-fluorocytidine-3'-phosphate
  modified_base 4: mod_base = OTHER; note = 2'-O-methyladenosine-3'-phosphate
  modified_base 5: mod_base = OTHER; note = 2'-deoxy-2'-fluoroguanosine-3'-phosphate
  modified_base 6: mod_base = OTHER; note = 2'-O-methyluridine-3'-phosphate
  modified_base 7: mod_base = OTHER; note = 2'-deoxy-2'-fluoroguanosine-3'-phosphate
  modified_base 8: mod_base = OTHER; note = 2'-O-methyluridine-3'-phosphate
  modified_base 9: mod_base = OTHER; note = 2'-deoxy-2'-fluorouridine-3'-phosphate
  modified_base 10: mod_base = OTHER; note = 2'-deoxy-2'-fluorocytidine-3'-phosphate
  modified_base 11: mod_base = OTHER; note = 2'-deoxy-2'-fluorouridine-3'-phosphate
  modified_base 12: mod_base = OTHER; note = 2'-O-methyluridine-3'-phosphate
  modified_base 13: mod_base = OTHER; note = 2'-deoxy-2'-fluoroguanosine-3'-phosphate
  modified_base 14: mod_base = OTHER; note = 2'-O-methylcytidine-3'-phosphate
  modified_base 15: mod_base = OTHER; note = 2'-deoxy-2'-fluorouridine-3'-phosphate
  modified_base 16: mod_base = OTHER; note = 2'-O-methylcytidine-3'-phosphate
  modified_base 17: mod_base = OTHER; note = 2'-deoxy-2'-fluorouridine-3'-phosphate
  modified_base 18: mod_base = OTHER; note = 2'-O-methyladenosine-3'-phosphate
  modified_base 19: mod_base = OTHER; note = 2'-deoxy-2'-fluorouridine-3'-phosphate
  modified_base 20: mod_base = OTHER; note = 2'-O-methyladenosine-3'-phosphate
  modified_base 21: mod_base = OTHER; note = 2'-deoxy-2'-fluoroadenosine-3'-phosphate conjugated at the 3'-end to an L96 ligand
aacagtgttcttgctctataa

SEQ ID NO: 526 - RNA, 21 nt, synthetic construct
  source 1..21: mol_type = other RNA
  modified_base 1: mod_base = OTHER; note = 2'-deoxy-2'-fluoroadenosine-3'-phosphorothioate
  modified_base 2: mod_base = OTHER; note = 2'-O-methyladenosine-3'-phosphorothioate
  modified_base 3: mod_base = OTHER; note = 2'-deoxy-2'-fluorocytidine-3'-phosphate
  modified_base 4: mod_base = OTHER; note = 2'-O-methyladenosine-3'-phosphate
  modified_base 5: mod_base = OTHER; note = 2'-deoxy-2'-fluoroguanosine-3'-phosphate
  modified_base 6: mod_base = OTHER; note = 2'-O-methyluridine-3'-phosphate
  modified_base 7: mod_base = OTHER; note = 2'-deoxy-2'-fluoroguanosine-3'-phosphate
  modified_base 8: mod_base = OTHER; note = 2'-O-methyluridine-3'-phosphate
  modified_base 9: mod_base = OTHER; note = 2'-deoxy-2'-fluorouridine-3'-phosphate
  modified_base 10: mod_base = OTHER; note = 2'-deoxy-2'-fluorocytidine-3'-phosphate
  modified_base 11: mod_base = OTHER; note = 2'-deoxy-2'-fluorouridine-3'-phosphate
  modified_base 12: mod_base = OTHER; note = 2'-O-methyluridine-3'-phosphate
  modified_base 13: mod_base = OTHER; note = 2'-deoxy-2'-fluoroguanosine-3'-phosphate
  modified_base 14: mod_base = OTHER; note = 2'-O-methylcytidine-3'-phosphate
  modified_base 15: mod_base = OTHER; note = 2'-deoxy-2'-fluorouridine-3'-phosphate
  modified_base 16: mod_base = OTHER; note = 2'-O-methylcytidine-3'-phosphate
  modified_base 17: mod_base = OTHER; note = 2'-deoxy-2'-fluorouridine-3'-phosphate
  modified_base 18: mod_base = OTHER; note = 2'-O-methyladenosine-3'-phosphate
  modified_base 19: mod_base = OTHER; note = 2'-deoxy-2'-fluorouridine-3'-phosphate
  modified_base 20: mod_base = OTHER; note = 2'-O-methyladenosine-3'-phosphate
  modified_base 21: mod_base = OTHER; note = 2'-deoxy-2'-fluoroadenosine-3'-phosphate conjugated at the 3'-end to an L96 ligand
aacagtgttcttgctctataa

SEQ ID NO: 527 - RNA, 21 nt, synthetic construct
  source 1..21: mol_type = other RNA
  modified_base 1: mod_base = OTHER; note = 1-deoxy-1-(adenin-9-yl)-alpha-L-threofuranose 2-phosphorothioate
  modified_base 2: mod_base = OTHER; note = 2'-O-methyladenosine-3'-phosphorothioate
  modified_base 3: mod_base = OTHER; note = 2'-deoxy-2'-fluorocytidine-3'-phosphate
  modified_base 4: mod_base = OTHER; note = 2'-O-methyladenosine-3'-phosphate
  modified_base 5: mod_base = OTHER; note = 2'-deoxy-2'-fluoroguanosine-3'-phosphate
  modified_base 6: mod_base = OTHER; note = 2'-O-methyluridine-3'-phosphate
  modified_base 7: mod_base = OTHER; note = 2'-deoxy-2'-fluoroguanosine-3'-phosphate
  modified_base 8: mod_base = OTHER; note = 2'-O-methyluridine-3'-phosphate
  modified_base 9: mod_base = OTHER; note = 2'-deoxy-2'-fluorouridine-3'-phosphate
  modified_base 10: mod_base = OTHER; note = 2'-deoxy-2'-fluorocytidine-3'-phosphate
  modified_base 11: mod_base = OTHER; note = 2'-deoxy-2'-fluorouridine-3'-phosphate
  modified_base 12: mod_base = OTHER; note = 2'-O-methyluridine-3'-phosphate
  modified_base 13: mod_base = OTHER; note = 2'-deoxy-2'-fluoroguanosine-3'-phosphate
  modified_base 14: mod_base = OTHER; note = 2'-O-methylcytidine-3'-phosphate
  modified_base 15: mod_base = OTHER; note = 2'-deoxy-2'-fluorouridine-3'-phosphate
  modified_base 16: mod_base = OTHER; note = 2'-O-methylcytidine-3'-phosphate
  modified_base 17: mod_base = OTHER; note = 2'-deoxy-2'-fluorouridine-3'-phosphate
  modified_base 18: mod_base = OTHER; note = 2'-O-methyladenosine-3'-phosphate
  modified_base 19: mod_base = OTHER; note = 2'-deoxy-2'-fluorouridine-3'-phosphate
  modified_base 20: mod_base = OTHER; note = 2'-O-methyladenosine-3'-phosphate
  modified_base 21: mod_base = OTHER; note = 2'-deoxy-2'-fluoroadenosine-3'-phosphate conjugated at the 3'-end to an L96 ligand
aacagtgttcttgctctataa

SEQ ID NO: 528 - RNA, 21 nt, synthetic construct
  source 1..21: mol_type = other RNA
  modified_base 1: mod_base = OTHER; note = 2'-deoxy-2'-fluoroadenosine-3'-phosphorothioate
  modified_base 2: mod_base = OTHER; note = 1-deoxy-1-(adenin-9-yl)-alpha-L-threofuranose 2-phosphorothioate
  modified_base 3: mod_base = OTHER; note = 2'-deoxy-2'-fluorocytidine-3'-phosphate
  modified_base 4: mod_base = OTHER; note = 2'-O-methyladenosine-3'-phosphate
  modified_base 5: mod_base = OTHER; note = 2'-deoxy-2'-fluoroguanosine-3'-phosphate
  modified_base 6: mod_base = OTHER; note = 2'-O-methyluridine-3'-phosphate
  modified_base 7: mod_base = OTHER; note = 2'-deoxy-2'-fluoroguanosine-3'-phosphate
  modified_base 8: mod_base = OTHER; note = 2'-O-methyluridine-3'-phosphate
  modified_base 9: mod_base = OTHER; note = 2'-deoxy-2'-fluorouridine-3'-phosphate
  modified_base 10: mod_base = OTHER; note = 2'-deoxy-2'-fluorocytidine-3'-phosphate
  modified_base 11: mod_base = OTHER; note = 2'-deoxy-2'-fluorouridine-3'-phosphate
  modified_base 12: mod_base = OTHER; note = 2'-O-methyluridine-3'-phosphate
  modified_base 13: mod_base = OTHER; note = 2'-deoxy-2'-fluoroguanosine-3'-phosphate
  modified_base 14: mod_base = OTHER; note = 2'-O-methylcytidine-3'-phosphate
  modified_base 15: mod_base = OTHER; note = 2'-deoxy-2'-fluorouridine-3'-phosphate
  modified_base 16: mod_base = OTHER; note = 2'-O-methylcytidine-3'-phosphate
  modified_base 17: mod_base = OTHER; note = 2'-deoxy-2'-fluorouridine-3'-phosphate
  modified_base 18: mod_base = OTHER; note = 2'-O-methyladenosine-3'-phosphate
  modified_base 19: mod_base = OTHER; note = 2'-deoxy-2'-fluorouridine-3'-phosphate
  modified_base 20: mod_base = OTHER; note = 2'-O-methyladenosine-3'-phosphate
  modified_base 21: mod_base = OTHER; note = 2'-deoxy-2'-fluoroadenosine-3'-phosphate conjugated at the 3'-end to an L96 ligand
aacagtgttcttgctctataa

SEQ ID NO: 529 - RNA, 21 nt, synthetic construct
  source 1..21: mol_type = other RNA
  modified_base 1: mod_base = OTHER; note = 2'-deoxy-2'-fluoroadenosine-3'-phosphorothioate
  modified_base 2: mod_base = OTHER; note = 2'-O-methyladenosine-3'-phosphorothioate
  modified_base 3: mod_base = OTHER; note 1-deoxy-1-(5-methylcytosin-1-yl)-alpha-L-threofuranose 2-phosphate
  modified_base 4: mod_base = OTHER; note = 2'-O-methyladenosine-3'-phosphate
  modified_base 5: mod_base = OTHER; note = 2'-deoxy-2'-fluoroguanosine-3'-phosphate
  modified_base 6: mod_base = OTHER; note = 2'-O-methyluridine-3'-phosphate
  modified_base 7: mod_base = OTHER; note = 2'-deoxy-2'-fluoroguanosine-3'-phosphate
  modified_base 8: mod_base = OTHER; note = 2'-O-methyluridine-3'-phosphate
  modified_base 9: mod_base = OTHER; note = 2'-deoxy-2'-fluorouridine-3'-phosphate
  modified_base 10: mod_base = OTHER; note = 2'-deoxy-2'-fluorocytidine-3'-phosphate
  modified_base 11: mod_base = OTHER; note = 2'-deoxy-2'-fluorouridine-3'-phosphate
  modified_base 12: mod_base = OTHER; note = 2'-O-methyluridine-3'-phosphate
  modified_base 13: mod_base = OTHER; note = 2'-deoxy-2'-fluoroguanosine-3'-phosphate
  modified_base 14: mod_base = OTHER; note = 2'-O-methylcytidine-3'-phosphate
  modified_base 15: mod_base = OTHER; note = 2'-deoxy-2'-fluorouridine-3'-phosphate
  modified_base 16: mod_base = OTHER; note = 2'-O-methylcytidine-3'-phosphate
  modified_base 17: mod_base = OTHER; note = 2'-deoxy-2'-fluorouridine-3'-phosphate
  modified_base 18: mod_base = OTHER; note = 2'-O-methyladenosine-3'-phosphate
  modified_base 19: mod_base = OTHER; note = 2'-deoxy-2'-fluorouridine-3'-phosphate
  modified_base 20: mod_base = OTHER; note = 2'-O-methyladenosine-3'-phosphate
  modified_base 21: mod_base = OTHER; note = 2'-deoxy-2'-fluoroadenosine-3'-phosphate conjugated at the 3'-end to an L96 ligand
aacagtgttcttgctctataa

SEQ ID NO: 530 - RNA, 21 nt, synthetic construct
  source 1..21: mol_type = other RNA
  modified_base 1: mod_base = OTHER; note = 2'-deoxy-2'-fluoroadenosine-3'-phosphorothioate
  modified_base 2: mod_base = OTHER; note = 2'-O-methyladenosine-3'-phosphorothioate
  modified_base 3: mod_base = OTHER; note = 2'-deoxy-2'-fluorocytidine-3'-phosphate
  modified_base 4: mod_base = OTHER; note = 1-deoxy-1-(adenin-9-yl)-alpha-L-threofuranose 2-phosphate
  modified_base 5: mod_base = OTHER; note = 2'-deoxy-2'-fluoroguanosine-3'-phosphate
  modified_base 6: mod_base = OTHER; note = 2'-O-methyluridine-3'-phosphate
  modified_base 7: mod_base = OTHER; note = 2'-deoxy-2'-fluoroguanosine-3'-phosphate
  modified_base 8: mod_base = OTHER; note = 2'-O-methyluridine-3'-phosphate
  modified_base 9: mod_base = OTHER; note = 2'-deoxy-2'-fluorouridine-3'-phosphate
  modified_base 10: mod_base = OTHER; note = 2'-deoxy-2'-fluorocytidine-3'-phosphate
  modified_base 11: mod_base = OTHER; note = 2'-deoxy-2'-fluorouridine-3'-phosphate
  modified_base 12: mod_base = OTHER; note = 2'-O-methyluridine-3'-phosphate
  modified_base 13: mod_base = OTHER; note = 2'-deoxy-2'-fluoroguanosine-3'-phosphate
  modified_base 14: mod_base = OTHER; note = 2'-O-methylcytidine-3'-phosphate
  modified_base 15: mod_base = OTHER; note = 2'-deoxy-2'-fluorouridine-3'-phosphate
  modified_base 16: mod_base = OTHER; note = 2'-O-methylcytidine-3'-phosphate
  modified_base 17: mod_base = OTHER; note = 2'-deoxy-2'-fluorouridine-3'-phosphate
  modified_base 18: mod_base = OTHER; note = 2'-O-methyladenosine-3'-phosphate
  modified_base 19: mod_base = OTHER; note = 2'-deoxy-2'-fluorouridine-3'-phosphate
  modified_base 20: mod_base = OTHER; note = 2'-O-methyladenosine-3'-phosphate
  modified_base 21: mod_base = OTHER; note = 2'-deoxy-2'-fluoroadenosine-3'-phosphate conjugated at the 3'-end to an L96 ligand
aacagtgttcttgctctataa

SEQ ID NO: 531 - RNA, 21 nt, synthetic construct
  source 1..21: mol_type = other RNA
  modified_base 1: mod_base = OTHER; note = 2'-deoxy-2'-fluoroadenosine-3'-phosphorothioate
  modified_base 2: mod_base = OTHER; note = 2'-O-methyladenosine-3'-phosphorothioate
  modified_base 3: mod_base = OTHER; note = 2'-deoxy-2'-fluorocytidine-3'-phosphate
  modified_base 4: mod_base = OTHER; note = 2'-O-methyladenosine-3'-phosphate
  modified_base 5: mod_base = OTHER; note = 1-deoxy-1-(guanin-9-yl)-alpha-L-threofuranose 2-phosphate
  modified_base 6: mod_base = OTHER; note = 2'-O-methyluridine-3'-phosphate
  modified_base 7: mod_base = OTHER; note = 2'-deoxy-2'-fluoroguanosine-3'-phosphate
  modified_base 8: mod_base = OTHER; note = 2'-O-methyluridine-3'-phosphate
  modified_base 9: mod_base = OTHER; note = 2'-deoxy-2'-fluorouridine-3'-phosphate
  modified_base 10: mod_base = OTHER; note = 2'-deoxy-2'-fluorocytidine-3'-phosphate
  modified_base 11: mod_base = OTHER; note = 2'-deoxy-2'-fluorouridine-3'-phosphate
  modified_base 12: mod_base = OTHER; note = 2'-O-methyluridine-3'-phosphate
  modified_base 13: mod_base = OTHER; note = 2'-deoxy-2'-fluoroguanosine-3'-phosphate
  modified_base 14: mod_base = OTHER; note = 2'-O-methylcytidine-3'-phosphate
  modified_base 15: mod_base = OTHER; note = 2'-deoxy-2'-fluorouridine-3'-phosphate
  modified_base 16: mod_base = OTHER; note = 2'-O-methylcytidine-3'-phosphate
  modified_base 17: mod_base = OTHER; note = 2'-deoxy-2'-fluorouridine-3'-phosphate
  modified_base 18: mod_base = OTHER; note = 2'-O-methyladenosine-3'-phosphate
  modified_base 19: mod_base = OTHER; note = 2'-deoxy-2'-fluorouridine-3'-phosphate
  modified_base 20: mod_base = OTHER; note = 2'-O-methyladenosine-3'-phosphate
  modified_base 21: mod_base = OTHER; note = 2'-deoxy-2'-fluoroadenosine-3'-phosphate conjugated at the 3'-end to an L96 ligand
aacagtgttcttgctctataa

SEQ ID NO: 532 - RNA, 21 nt, synthetic construct
  source 1..21: mol_type = other RNA
  modified_base 1: mod_base = OTHER; note = 2'-deoxy-2'-fluoroadenosine-3'-phosphorothioate
  modified_base 2: mod_base = OTHER; note = 2'-O-methyladenosine-3'-phosphorothioate
  modified_base 3: mod_base = OTHER; note = 2'-deoxy-2'-fluorocytidine-3'-phosphate
  modified_base 4: mod_base = OTHER; note = 2'-O-methyladenosine-3'-phosphate
  modified_base 5: mod_base = OTHER; note = 2'-deoxy-2'-fluoroguanosine-3'-phosphate
  modified_base 6: mod_base = OTHER; note = 1-deoxy-1-(thymin-1-yl)-alpha-L-threofuranose 2-phosphate
  modified_base 7: mod_base = OTHER; note = 2'-deoxy-2'-fluoroguanosine-3'-phosphate
  modified_base 8: mod_base = OTHER; note = 2'-O-methyluridine-3'-phosphate
  modified_base 9: mod_base = OTHER; note = 2'-deoxy-2'-fluorouridine-3'-phosphate
  modified_base 10: mod_base = OTHER; note = 2'-deoxy-2'-fluorocytidine-3'-phosphate
  modified_base 11: mod_base = OTHER; note = 2'-deoxy-2'-fluorouridine-3'-phosphate
  modified_base 12: mod_base = OTHER; note = 2'-O-methyluridine-3'-phosphate
  modified_base 13: mod_base = OTHER; note = 2'-deoxy-2'-fluoroguanosine-3'-phosphate
  modified_base 14: mod_base = OTHER; note = 2'-O-methylcytidine-3'-phosphate
  modified_base 15: mod_base = OTHER; note = 2'-deoxy-2'-fluorouridine-3'-phosphate
  modified_base 16: mod_base = OTHER; note = 2'-O-methylcytidine-3'-phosphate
  modified_base 17: mod_base = OTHER; note = 2'-deoxy-2'-fluorouridine-3'-phosphate
  modified_base 18: mod_base = OTHER; note = 2'-O-methyladenosine-3'-phosphate
  modified_base 19: mod_base = OTHER; note = 2'-deoxy-2'-fluorouridine-3'-phosphate
  modified_base 20: mod_base = OTHER; note = 2'-O-methyladenosine-3'-phosphate
  modified_base 21: mod_base = OTHER; note = 2'-deoxy-2'-fluoroadenosine-3'-phosphate conjugated at the 3'-end to an L96 ligand
aacagtgttcttgctctataa

SEQ ID NO: 533 - RNA, 21 nt, synthetic construct
  source 1..21: mol_type = other RNA
  modified_base 1: mod_base = OTHER; note = 2'-deoxy-2'-fluoroadenosine-3'-phosphorothioate
  modified_base 2: mod_base = OTHER; note = 2'-O-methyladenosine-3'-phosphorothioate
  modified_base 3: mod_base = OTHER; note = 2'-deoxy-2'-fluorocytidine-3'-phosphate
  modified_base 4: mod_base = OTHER; note = 2'-O-methyladenosine-3'-phosphate
  modified_base 5: mod_base = OTHER; note = 2'-deoxy-2'-fluoroguanosine-3'-phosphate
  modified_base 6: mod_base = OTHER; note = 2'-O-methyluridine-3'-phosphate
  modified_base 7: mod_base = OTHER; note = 1-deoxy-1-(guanin-9-yl)-alpha-L-threofuranose 2-phosphate
  modified_base 8: mod_base = OTHER; note = 2'-O-methyluridine-3'-phosphate
  modified_base 9: mod_base = OTHER; note = 2'-deoxy-2'-fluorouridine-3'-phosphate
  modified_base 10: mod_base = OTHER; note = 2'-deoxy-2'-fluorocytidine-3'-phosphate
  modified_base 11: mod_base = OTHER; note = 2'-deoxy-2'-fluorouridine-3'-phosphate
  modified_base 12: mod_base = OTHER; note = 2'-O-methyluridine-3'-phosphate
  modified_base 13: mod_base = OTHER; note = 2'-deoxy-2'-fluoroguanosine-3'-phosphate
  modified_base 14: mod_base = OTHER; note = 2'-O-methylcytidine-3'-phosphate
  modified_base 15: mod_base = OTHER; note = 2'-deoxy-2'-fluorouridine-3'-phosphate
  modified_base 16: mod_base = OTHER; note = 2'-O-methylcytidine-3'-phosphate
  modified_base 17: mod_base = OTHER; note = 2'-deoxy-2'-fluorouridine-3'-phosphate
  modified_base 18: mod_base = OTHER; note = 2'-O-methyladenosine-3'-phosphate
  modified_base 19: mod_base = OTHER; note = 2'-deoxy-2'-fluorouridine-3'-phosphate
  modified_base 20: mod_base = OTHER; note = 2'-O-methyladenosine-3'-phosphate
  modified_base 21: mod_base = OTHER; note = 2'-deoxy-2'-fluoroadenosine-3'-phosphate conjugated at the 3'-end to an L96 ligand
aacagtgttcttgctctataa

SEQ ID NO: 534 - RNA, 21 nt, synthetic construct
  source 1..21: mol_type = other RNA
  modified_base 1: mod_base = OTHER; note = 2'-deoxy-2'-fluoroadenosine-3'-phosphorothioate
  modified_base 2: mod_base = OTHER; note = 2'-O-methyladenosine-3'-phosphorothioate
  modified_base 3: mod_base = OTHER; note = 2'-deoxy-2'-fluorocytidine-3'-phosphate
  modified_base 4: mod_base = OTHER; note = 2'-O-methyladenosine-3'-phosphate
  modified_base 5: mod_base = OTHER; note = 2'-deoxy-2'-fluoroguanosine-3'-phosphate
  modified_base 6: mod_base = OTHER; note = 2'-O-methyluridine-3'-phosphate
  modified_base 7: mod_base = OTHER; note = 2'-deoxy-2'-fluoroguanosine-3'-phosphate
  modified_base 8: mod_base = OTHER; note = 1-deoxy-1-(thymin-1-yl)-alpha-L-threofuranose 2-phosphate
  modified_base 9: mod_base = OTHER; note = 2'-deoxy-2'-fluorouridine-3'-phosphate
  modified_base 10: mod_base = OTHER; note = 2'-deoxy-2'-fluorocytidine-3'-phosphate
  modified_base 11: mod_base = OTHER; note = 2'-deoxy-2'-fluorouridine-3'-phosphate
  modified_base 12: mod_base = OTHER; note = 2'-O-methyluridine-3'-phosphate
  modified_base 13: mod_base = OTHER; note = 2'-deoxy-2'-fluoroguanosine-3'-phosphate
  modified_base 14: mod_base = OTHER; note = 2'-O-methylcytidine-3'-phosphate
  modified_base 15: mod_base = OTHER; note = 2'-deoxy-2'-fluorouridine-3'-phosphate
  modified_base 16: mod_base = OTHER; note = 2'-O-methylcytidine-3'-phosphate
  modified_base 17: mod_base = OTHER; note = 2'-deoxy-2'-fluorouridine-3'-phosphate
  modified_base 18: mod_base = OTHER; note = 2'-O-methyladenosine-3'-phosphate
  modified_base 19: mod_base = OTHER; note = 2'-deoxy-2'-fluorouridine-3'-phosphate
  modified_base 20: mod_base = OTHER; note = 2'-O-methyladenosine-3'-phosphate
  modified_base 21: mod_base = OTHER; note = 2'-deoxy-2'-fluoroadenosine-3'-phosphate conjugated at the 3'-end to an L96 ligand
aacagtgttcttgctctataa

SEQ ID NO: 535 - RNA, 21 nt, synthetic construct
  source 1..21: mol_type = other RNA
  modified_base 1: mod_base = OTHER; note = 2'-deoxy-2'-fluoroadenosine-3'-phosphorothioate
  modified_base 2: mod_base = OTHER; note = 2'-O-methyladenosine-3'-phosphorothioate
  modified_base 3: mod_base = OTHER; note = 2'-deoxy-2'-fluorocytidine-3'-phosphate
  modified_base 4: mod_base = OTHER; note = 2'-O-methyladenosine-3'-phosphate
  modified_base 5: mod_base = OTHER; note = 2'-deoxy-2'-fluoroguanosine-3'-phosphate
  modified_base 6: mod_base = OTHER; note = 2'-O-methyluridine-3'-phosphate
  modified_base 7: mod_base = OTHER; note = 2'-deoxy-2'-fluoroguanosine-3'-phosphate
  modified_base 8: mod_base = OTHER; note = 2'-O-methyluridine-3'-phosphate
  modified_base 9: mod_base = OTHER; note = 1-deoxy-1-(thymin-1-yl)-alpha-L-threofuranose 2-phosphate
  modified_base 10: mod_base = OTHER; note = 2'-deoxy-2'-fluorocytidine-3'-phosphate
  modified_base 11: mod_base = OTHER; note = 2'-deoxy-2'-fluorouridine-3'-phosphate
  modified_base 12: mod_base = OTHER; note = 2'-O-methyluridine-3'-phosphate
  modified_base 13: mod_base = OTHER; note = 2'-deoxy-2'-fluoroguanosine-3'-phosphate
  modified_base 14: mod_base = OTHER; note = 2'-O-methylcytidine-3'-phosphate
  modified_base 15: mod_base = OTHER; note = 2'-deoxy-2'-fluorouridine-3'-phosphate
  modified_base 16: mod_base = OTHER; note = 2'-O-methylcytidine-3'-phosphate
  modified_base 17: mod_base = OTHER; note = 2'-deoxy-2'-fluorouridine-3'-phosphate
  modified_base 18: mod_base = OTHER; note = 2'-O-methyladenosine-3'-phosphate
  modified_base 19: mod_base = OTHER; note = 2'-deoxy-2'-fluorouridine-3'-phosphate
  modified_base 20: mod_base = OTHER; note = 2'-O-methyladenosine-3'-phosphate
  modified_base 21: mod_base = OTHER; note = 2'-deoxy-2'-fluoroadenosine-3'-phosphate conjugated at the 3'-end to an L96 ligand
aacagtgttcttgctctataa

SEQ ID NO: 536 - RNA, 21 nt, synthetic construct
  source 1..21: mol_type = other RNA
  modified_base 1: mod_base = OTHER; note = 2'-deoxy-2'-fluoroadenosine-3'-phosphorothioate
  modified_base 2: mod_base = OTHER; note = 2'-O-methyladenosine-3'-phosphorothioate
  modified_base 3: mod_base = OTHER; note = 2'-deoxy-2'-fluorocytidine-3'-phosphate
  modified_base 4: mod_base = OTHER; note = 2'-O-methyladenosine-3'-phosphate
  modified_base 5: mod_base = OTHER; note = 2'-deoxy-2'-fluoroguanosine-3'-phosphate
  modified_base 6: mod_base = OTHER; note = 2'-O-methyluridine-3'-phosphate
  modified_base 7: mod_base = OTHER; note = 2'-deoxy-2'-fluoroguanosine-3'-phosphate
  modified_base 8: mod_base = OTHER; note = 2'-O-methyluridine-3'-phosphate
  modified_base 9: mod_base = OTHER; note = 2'-deoxy-2'-fluorouridine-3'-phosphate
  modified_base 10: mod_base = OTHER; note 1-deoxy-1-(5-methylcytosin-1-yl)-alpha-L-threofuranose 2-phosphate
  modified_base 11: mod_base = OTHER; note = 2'-deoxy-2'-fluorouridine-3'-phosphate
  modified_base 12: mod_base = OTHER; note = 2'-O-methyluridine-3'-phosphate
  modified_base 13: mod_base = OTHER; note = 2'-deoxy-2'-fluoroguanosine-3'-phosphate
  modified_base 14: mod_base = OTHER; note = 2'-O-methylcytidine-3'-phosphate
  modified_base 15: mod_base = OTHER; note = 2'-deoxy-2'-fluorouridine-3'-phosphate
  modified_base 16: mod_base = OTHER; note = 2'-O-methylcytidine-3'-phosphate
  modified_base 17: mod_base = OTHER; note = 2'-deoxy-2'-fluorouridine-3'-phosphate
  modified_base 18: mod_base = OTHER; note = 2'-O-methyladenosine-3'-phosphate
  modified_base 19: mod_base = OTHER; note = 2'-deoxy-2'-fluorouridine-3'-phosphate
  modified_base 20: mod_base = OTHER; note = 2'-O-methyladenosine-3'-phosphate
  modified_base 21: mod_base = OTHER; note = 2'-deoxy-2'-fluoroadenosine-3'-phosphate conjugated at the 3'-end to an L96 ligand
aacagtgttcttgctctataa

SEQ ID NO: 537 - RNA, 21 nt, synthetic construct
  source 1..21: mol_type = other RNA
  modified_base 1: mod_base = OTHER; note = 2'-deoxy-2'-fluoroadenosine-3'-phosphorothioate
  modified_base 2: mod_base = OTHER; note = 2'-O-methyladenosine-3'-phosphorothioate
  modified_base 3: mod_base = OTHER; note = 2'-deoxy-2'-fluorocytidine-3'-phosphate
  modified_base 4: mod_base = OTHER; note = 2'-O-methyladenosine-3'-phosphate
  modified_base 5: mod_base = OTHER; note = 2'-deoxy-2'-fluoroguanosine-3'-phosphate
  modified_base 6: mod_base = OTHER; note = 2'-O-methyluridine-3'-phosphate
  modified_base 7: mod_base = OTHER; note = 2'-deoxy-2'-fluoroguanosine-3'-phosphate
  modified_base 8: mod_base = OTHER; note = 2'-O-methyluridine-3'-phosphate
  modified_base 9: mod_base = OTHER; note = 2'-deoxy-2'-fluorouridine-3'-phosphate
  modified_base 10: mod_base = OTHER; note = 2'-deoxy-2'-fluorocytidine-3'-phosphate
  modified_base 11: mod_base = OTHER; note = 1-deoxy-1-(thymin-1-yl)-alpha-L-threofuranose 2-phosphate
  modified_base 12: mod_base = OTHER; note = 2'-O-methyluridine-3'-phosphate
  modified_base 13: mod_base = OTHER; note = 2'-deoxy-2'-fluoroguanosine-3'-phosphate
  modified_base 14: mod_base = OTHER; note = 2'-O-methylcytidine-3'-phosphate
  modified_base 15: mod_base = OTHER; note = 2'-deoxy-2'-fluorouridine-3'-phosphate
  modified_base 16: mod_base = OTHER; note = 2'-O-methylcytidine-3'-phosphate
  modified_base 17: mod_base = OTHER; note = 2'-deoxy-2'-fluorouridine-3'-phosphate
  modified_base 18: mod_base = OTHER; note = 2'-O-methyladenosine-3'-phosphate
  modified_base 19: mod_base = OTHER; note = 2'-deoxy-2'-fluorouridine-3'-phosphate
  modified_base 20: mod_base = OTHER; note = 2'-O-methyladenosine-3'-phosphate
  modified_base 21: mod_base = OTHER; note = 2'-deoxy-2'-fluoroadenosine-3'-phosphate conjugated at the 3'-end to an L96 ligand
aacagtgttcttgctctataa

SEQ ID NO: 538 - RNA, 21 nt, synthetic construct
  source 1..21: mol_type = other RNA
  modified_base 1: mod_base = OTHER; note = 2'-deoxy-2'-fluoroadenosine-3'-phosphorothioate
  modified_base 2: mod_base = OTHER; note = 2'-O-methyladenosine-3'-phosphorothioate
  modified_base 3: mod_base = OTHER; note = 2'-deoxy-2'-fluorocytidine-3'-phosphate
  modified_base 4: mod_base = OTHER; note = 2'-O-methyladenosine-3'-phosphate
  modified_base 5: mod_base = OTHER; note = 2'-deoxy-2'-fluoroguanosine-3'-phosphate
  modified_base 6: mod_base = OTHER; note = 2'-O-methyluridine-3'-phosphate
  modified_base 7: mod_base = OTHER; note = 2'-deoxy-2'-fluoroguanosine-3'-phosphate
  modified_base 8: mod_base = OTHER; note = 2'-O-methyluridine-3'-phosphate
  modified_base 9: mod_base = OTHER; note = 2'-deoxy-2'-fluorouridine-3'-phosphate
  modified_base 10: mod_base = OTHER; note = 2'-deoxy-2'-fluorocytidine-3'-phosphate
  modified_base 11: mod_base = OTHER; note = 2'-deoxy-2'-fluorouridine-3'-phosphate
  modified_base 12: mod_base = OTHER; note = 1-deoxy-1-(thymin-1-yl)-alpha-L-threofuranose 2-phosphate
  modified_base 13: mod_base = OTHER; note = 2'-deoxy-2'-fluoroguanosine-3'-phosphate
  modified_base 14: mod_base = OTHER; note = 2'-O-methylcytidine-3'-phosphate
  modified_base 15: mod_base = OTHER; note = 2'-deoxy-2'-fluorouridine-3'-phosphate
  modified_base 16: mod_base = OTHER; note = 2'-O-methylcytidine-3'-phosphate
  modified_base 17: mod_base = OTHER; note = 2'-deoxy-2'-fluorouridine-3'-phosphate
  modified_base 18: mod_base = OTHER; note = 2'-O-methyladenosine-3'-phosphate
  modified_base 19: mod_base = OTHER; note = 2'-deoxy-2'-fluorouridine-3'-phosphate
  modified_base 20: mod_base = OTHER; note = 2'-O-methyladenosine-3'-phosphate
  modified_base 21: mod_base = OTHER; note = 2'-deoxy-2'-fluoroadenosine-3'-phosphate conjugated at the 3'-end to an L96 ligand
aacagtgttcttgctctataa

SEQ ID NO: 539 - RNA, 21 nt, synthetic construct
  source 1..21: mol_type = other RNA
  modified_base 1: mod_base = OTHER; note = 2'-deoxy-2'-fluoroadenosine-3'-phosphorothioate
  modified_base 2: mod_base = OTHER; note = 2'-O-methyladenosine-3'-phosphorothioate
  modified_base 3: mod_base = OTHER; note = 2'-deoxy-2'-fluorocytidine-3'-phosphate
  modified_base 4: mod_base = OTHER; note = 2'-O-methyladenosine-3'-phosphate
  modified_base 5: mod_base = OTHER; note = 2'-deoxy-2'-fluoroguanosine-3'-phosphate
  modified_base 6: mod_base = OTHER; note = 2'-O-methyluridine-3'-phosphate
  modified_base 7: mod_base = OTHER; note = 2'-deoxy-2'-fluoroguanosine-3'-phosphate
  modified_base 8: mod_base = OTHER; note = 2'-O-methyluridine-3'-phosphate
  modified_base 9: mod_base = OTHER; note = 2'-deoxy-2'-fluorouridine-3'-phosphate
  modified_base 10: mod_base = OTHER; note = 2'-deoxy-2'-fluorocytidine-3'-phosphate
  modified_base 11: mod_base = OTHER; note = 2'-deoxy-2'-fluorouridine-3'-phosphate
  modified_base 12: mod_base = OTHER; note = 2'-O-methyluridine-3'-phosphate
  modified_base 13: mod_base = OTHER; note = 1-deoxy-1-(guanin-9-yl)-alpha-L-threofuranose 2-phosphate
  modified_base 14: mod_base = OTHER; note = 2'-O-methylcytidine-3'-phosphate
  modified_base 15: mod_base = OTHER; note = 2'-deoxy-2'-fluorouridine-3'-phosphate
  modified_base 16: mod_base = OTHER; note = 2'-O-methylcytidine-3'-phosphate
  modified_base 17: mod_base = OTHER; note = 2'-deoxy-2'-fluorouridine-3'-phosphate
  modified_base 18: mod_base = OTHER; note = 2'-O-methyladenosine-3'-phosphate
  modified_base 19: mod_base = OTHER; note = 2'-deoxy-2'-fluorouridine-3'-phosphate
  modified_base 20: mod_base = OTHER; note = 2'-O-methyladenosine-3'-phosphate
  modified_base 21: mod_base = OTHER; note = 2'-deoxy-2'-fluoroadenosine-3'-phosphate conjugated at the 3'-end to an L96 ligand
aacagtgttcttgctctataa

SEQ ID NO: 540 - RNA, 21 nt, synthetic construct
  source 1..21: mol_type = other RNA
  modified_base 1: mod_base = OTHER; note = 2'-deoxy-2'-fluoroadenosine-3'-phosphorothioate
  modified_base 2: mod_base = OTHER; note = 2'-O-methyladenosine-3'-phosphorothioate
  modified_base 3: mod_base = OTHER; note = 2'-deoxy-2'-fluorocytidine-3'-phosphate
  modified_base 4: mod_base = OTHER; note = 2'-O-methyladenosine-3'-phosphate
  modified_base 5: mod_base = OTHER; note = 2'-deoxy-2'-fluoroguanosine-3'-phosphate
  modified_base 6: mod_base = OTHER; note = 2'-O-methyluridine-3'-phosphate
  modified_base 7: mod_base = OTHER; note = 2'-deoxy-2'-fluoroguanosine-3'-phosphate
  modified_base 8: mod_base = OTHER; note = 2'-O-methyluridine-3'-phosphate
  modified_base 9: mod_base = OTHER; note = 2'-deoxy-2'-fluorouridine-3'-phosphate
  modified_base 10: mod_base = OTHER; note = 2'-deoxy-2'-fluorocytidine-3'-phosphate
  modified_base 11: mod_base = OTHER; note = 2'-deoxy-2'-fluorouridine-3'-phosphate
  modified_base 12: mod_base = OTHER; note = 2'-O-methyluridine-3'-phosphate
  modified_base 13: mod_base = OTHER; note = 2'-deoxy-2'-fluoroguanosine-3'-phosphate
  modified_base 14: mod_base = OTHER; note 1-deoxy-1-(5-methylcytosin-1-yl)-alpha-L-threofuranose 2-phosphate
  modified_base 15: mod_base = OTHER; note = 2'-deoxy-2'-fluorouridine-3'-phosphate
  modified_base 16: mod_base = OTHER; note = 2'-O-methylcytidine-3'-phosphate
  modified_base 17: mod_base = OTHER; note = 2'-deoxy-2'-fluorouridine-3'-phosphate
  modified_base 18: mod_base = OTHER; note = 2'-O-methyladenosine-3'-phosphate
  modified_base 19: mod_base = OTHER; note = 2'-deoxy-2'-fluorouridine-3'-phosphate
  modified_base 20: mod_base = OTHER; note = 2'-O-methyladenosine-3'-phosphate
  modified_base 21: mod_base = OTHER; note = 2'-deoxy-2'-fluoroadenosine-3'-phosphate conjugated at the 3'-end to an L96 ligand
aacagtgttcttgctctataa

SEQ ID NO: 541 - RNA, 21 nt, synthetic construct
  source 1..21: mol_type = other RNA
  modified_base 1: mod_base = OTHER; note = 2'-deoxy-2'-fluoroadenosine-3'-phosphorothioate
  modified_base 2: mod_base = OTHER; note = 2'-O-methyladenosine-3'-phosphorothioate
  modified_base 3: mod_base = OTHER; note = 2'-deoxy-2'-fluorocytidine-3'-phosphate
  modified_base 4: mod_base = OTHER; note = 2'-O-methyladenosine-3'-phosphate
  modified_base 5: mod_base = OTHER; note = 2'-deoxy-2'-fluoroguanosine-3'-phosphate
  modified_base 6: mod_base = OTHER; note = 2'-O-methyluridine-3'-phosphate
  modified_base 7: mod_base = OTHER; note = 2'-deoxy-2'-fluoroguanosine-3'-phosphate
  modified_base 8: mod_base = OTHER; note = 2'-O-methyluridine-3'-phosphate
  modified_base 9: mod_base = OTHER; note = 2'-deoxy-2'-fluorouridine-3'-phosphate
  modified_base 10: mod_base = OTHER; note = 2'-deoxy-2'-fluorocytidine-3'-phosphate
  modified_base 11: mod_base = OTHER; note = 2'-deoxy-2'-fluorouridine-3'-phosphate
  modified_base 12: mod_base = OTHER; note = 2'-O-methyluridine-3'-phosphate
  modified_base 13: mod_base = OTHER; note = 2'-deoxy-2'-fluoroguanosine-3'-phosphate
  modified_base 14: mod_base = OTHER; note = 2'-O-methylcytidine-3'-phosphate
  modified_base 15: mod_base = OTHER; note = 1-deoxy-1-(thymin-1-yl)-alpha-L-threofuranose 2-phosphate
  modified_base 16: mod_base = OTHER; note = 2'-O-methylcytidine-3'-phosphate
  modified_base 17: mod_base = OTHER; note = 2'-deoxy-2'-fluorouridine-3'-phosphate
  modified_base 18: mod_base = OTHER; note = 2'-O-methyladenosine-3'-phosphate
  modified_base 19: mod_base = OTHER; note = 2'-deoxy-2'-fluorouridine-3'-phosphate
  modified_base 20: mod_base = OTHER; note = 2'-O-methyladenosine-3'-phosphate
  modified_base 21: mod_base = OTHER; note = 2'-deoxy-2'-fluoroadenosine-3'-phosphate conjugated at the 3'-end to an L96 ligand
aacagtgttcttgctctataa

SEQ ID NO: 542 - RNA, 21 nt, synthetic construct
  source 1..21: mol_type = other RNA
  modified_base 1: mod_base = OTHER; note = 2'-deoxy-2'-fluoroadenosine-3'-phosphorothioate
  modified_base 2: mod_base = OTHER; note = 2'-O-methyladenosine-3'-phosphorothioate
  modified_base 3: mod_base = OTHER; note = 2'-deoxy-2'-fluorocytidine-3'-phosphate
  modified_base 4: mod_base = OTHER; note = 2'-O-methyladenosine-3'-phosphate
  modified_base 5: mod_base = OTHER; note = 2'-deoxy-2'-fluoroguanosine-3'-phosphate
  modified_base 6: mod_base = OTHER; note = 2'-O-methyluridine-3'-phosphate
  modified_base 7: mod_base = OTHER; note = 2'-deoxy-2'-fluoroguanosine-3'-phosphate
  modified_base 8: mod_base = OTHER; note = 2'-O-methyluridine-3'-phosphate
  modified_base 9: mod_base = OTHER; note = 2'-deoxy-2'-fluorouridine-3'-phosphate
  modified_base 10: mod_base = OTHER; note = 2'-deoxy-2'-fluorocytidine-3'-phosphate
  modified_base 11: mod_base = OTHER; note = 2'-deoxy-2'-fluorouridine-3'-phosphate
  modified_base 12: mod_base = OTHER; note = 2'-O-methyluridine-3'-phosphate
  modified_base 13: mod_base = OTHER; note = 2'-deoxy-2'-fluoroguanosine-3'-phosphate
  modified_base 14: mod_base = OTHER; note = 2'-O-methylcytidine-3'-phosphate
  modified_base 15: mod_base = OTHER; note = 2'-deoxy-2'-fluorouridine-3'-phosphate
  modified_base 16: mod_base = OTHER; note 1-deoxy-1-(5-methylcytosin-1-yl)-alpha-L-threofuranose 2-phosphate
  modified_base 17: mod_base = OTHER; note = 2'-deoxy-2'-fluorouridine-3'-phosphate
  modified_base 18: mod_base = OTHER; note = 2'-O-methyladenosine-3'-phosphate
  modified_base 19: mod_base = OTHER; note = 2'-deoxy-2'-fluorouridine-3'-phosphate
  modified_base 20: mod_base = OTHER; note = 2'-O-methyladenosine-3'-phosphate
  modified_base 21: mod_base = OTHER; note = 2'-deoxy-2'-fluoroadenosine-3'-phosphate conjugated at the 3'-end to an L96 ligand
aacagtgttcttgctctataa

SEQ ID NO: 543 - RNA, 21 nt, synthetic construct
  source 1..21: mol_type = other RNA
  modified_base 1: mod_base = OTHER; note = 2'-deoxy-2'-fluoroadenosine-3'-phosphorothioate
  modified_base 2: mod_base = OTHER; note = 2'-O-methyladenosine-3'-phosphorothioate
  modified_base 3: mod_base = OTHER; note = 2'-deoxy-2'-fluorocytidine-3'-phosphate
  modified_base 4: mod_base = OTHER; note = 2'-O-methyladenosine-3'-phosphate
  modified_base 5: mod_base = OTHER; note = 2'-deoxy-2'-fluoroguanosine-3'-phosphate
  modified_base 6: mod_base = OTHER; note = 2'-O-methyluridine-3'-phosphate
  modified_base 7: mod_base = OTHER; note = 2'-deoxy-2'-fluoroguanosine-3'-phosphate
  modified_base 8: mod_base = OTHER; note = 2'-O-methyluridine-3'-phosphate
  modified_base 9: mod_base = OTHER; note = 2'-deoxy-2'-fluorouridine-3'-phosphate
  modified_base 10: mod_base = OTHER; note = 2'-deoxy-2'-fluorocytidine-3'-phosphate
  modified_base 11: mod_base = OTHER; note = 2'-deoxy-2'-fluorouridine-3'-phosphate
  modified_base 12: mod_base = OTHER; note = 2'-O-methyluridine-3'-phosphate
  modified_base 13: mod_base = OTHER; note = 2'-deoxy-2'-fluoroguanosine-3'-phosphate
  modified_base 14: mod_base = OTHER; note = 2'-O-methylcytidine-3'-phosphate
  modified_base 15: mod_base = OTHER; note = 2'-deoxy-2'-fluorouridine-3'-phosphate
  modified_base 16: mod_base = OTHER; note = 2'-O-methylcytidine-3'-phosphate
  modified_base 17: mod_base = OTHER; note = 1-deoxy-1-(thymin-1-yl)-alpha-L-threofuranose 2-phosphate
  modified_base 18: mod_base = OTHER; note = 2'-O-methyladenosine-3'-phosphate
  modified_base 19: mod_base = OTHER; note = 2'-deoxy-2'-fluorouridine-3'-phosphate
  modified_base 20: mod_base = OTHER; note = 2'-O-methyladenosine-3'-phosphate
  modified_base 21: mod_base = OTHER; note = 2'-deoxy-2'-fluoroadenosine-3'-phosphate conjugated at the 3'-end to an L96 ligand
aacagtgttcttgctctataa

SEQ ID NO: 544 - RNA, 21 nt, synthetic construct
  source 1..21: mol_type = other RNA
  modified_base 1: mod_base = OTHER; note = 2'-deoxy-2'-fluoroadenosine-3'-phosphorothioate
  modified_base 2: mod_base = OTHER; note = 2'-O-methyladenosine-3'-phosphorothioate
  modified_base 3: mod_base = OTHER; note = 2'-deoxy-2'-fluorocytidine-3'-phosphate
  modified_base 4: mod_base = OTHER; note = 2'-O-methyladenosine-3'-phosphate
  modified_base 5: mod_base = OTHER; note = 2'-deoxy-2'-fluoroguanosine-3'-phosphate
  modified_base 6: mod_base = OTHER; note = 2'-O-methyluridine-3'-phosphate
  modified_base 7: mod_base = OTHER; note = 2'-deoxy-2'-fluoroguanosine-3'-phosphate
  modified_base 8: mod_base = OTHER; note = 2'-O-methyluridine-3'-phosphate
  modified_base 9: mod_base = OTHER; note = 2'-deoxy-2'-fluorouridine-3'-phosphate
  modified_base 10: mod_base = OTHER; note = 2'-deoxy-2'-fluorocytidine-3'-phosphate
  modified_base 11: mod_base = OTHER; note = 2'-deoxy-2'-fluorouridine-3'-phosphate
  modified_base 12: mod_base = OTHER; note = 2'-O-methyluridine-3'-phosphate
  modified_base 13: mod_base = OTHER; note = 2'-deoxy-2'-fluoroguanosine-3'-phosphate
  modified_base 14: mod_base = OTHER; note = 2'-O-methylcytidine-3'-phosphate
  modified_base 15: mod_base = OTHER; note = 2'-deoxy-2'-fluorouridine-3'-phosphate
  modified_base 16: mod_base = OTHER; note = 2'-O-methylcytidine-3'-phosphate
  modified_base 17: mod_base = OTHER; note = 2'-deoxy-2'-fluorouridine-3'-phosphate
  modified_base 18: mod_base = OTHER; note = 1-deoxy-1-(adenin-9-yl)-alpha-L-threofuranose 2-phosphate
  modified_base 19: mod_base = OTHER; note = 2'-deoxy-2'-fluorouridine-3'-phosphate
  modified_base 20: mod_base = OTHER; note = 2'-O-methyladenosine-3'-phosphate
  modified_base 21: mod_base = OTHER; note = 2'-deoxy-2'-fluoroadenosine-3'-phosphate conjugated at the 3'-end to an L96 ligand
aacagtgttcttgctctataa

SEQ ID NO: 545 - RNA, 21 nt, synthetic construct
  source 1..21: mol_type = other RNA
  modified_base 1: mod_base = OTHER; note = 2'-deoxy-2'-fluoroadenosine-3'-phosphorothioate
  modified_base 2: mod_base = OTHER; note = 2'-O-methyladenosine-3'-phosphorothioate
  modified_base 3: mod_base = OTHER; note = 2'-deoxy-2'-fluorocytidine-3'-phosphate
  modified_base 4: mod_base = OTHER; note = 2'-O-methyladenosine-3'-phosphate
  modified_base 5: mod_base = OTHER; note = 2'-deoxy-2'-fluoroguanosine-3'-phosphate
  modified_base 6: mod_base = OTHER; note = 2'-O-methyluridine-3'-phosphate
  modified_base 7: mod_base = OTHER; note = 2'-deoxy-2'-fluoroguanosine-3'-phosphate
  modified_base 8: mod_base = OTHER; note = 2'-O-methyluridine-3'-phosphate
  modified_base 9: mod_base = OTHER; note = 2'-deoxy-2'-fluorouridine-3'-phosphate
  modified_base 10: mod_base = OTHER; note = 2'-deoxy-2'-fluorocytidine-3'-phosphate
  modified_base 11: mod_base = OTHER; note = 2'-deoxy-2'-fluorouridine-3'-phosphate
  modified_base 12: mod_base = OTHER; note = 2'-O-methyluridine-3'-phosphate
  modified_base 13: mod_base = OTHER; note = 2'-deoxy-2'-fluoroguanosine-3'-phosphate
  modified_base 14: mod_base = OTHER; note = 2'-O-methylcytidine-3'-phosphate
  modified_base 15: mod_base = OTHER; note = 2'-deoxy-2'-fluorouridine-3'-phosphate
  modified_base 16: mod_base = OTHER; note = 2'-O-methylcytidine-3'-phosphate
  modified_base 17: mod_base = OTHER; note = 2'-deoxy-2'-fluorouridine-3'-phosphate
  modified_base 18: mod_base = OTHER; note = 2'-O-methyladenosine-3'-phosphate
  modified_base 19: mod_base = OTHER; note = 1-deoxy-1-(thymin-1-yl)-alpha-L-threofuranose 2-phosphate
  modified_base 20: mod_base = OTHER; note = 2'-O-methyladenosine-3'-phosphate
  modified_base 21: mod_base = OTHER; note = 2'-deoxy-2'-fluoroadenosine-3'-phosphate conjugated at the 3'-end to an L96 ligand
aacagtgttcttgctctataa

SEQ ID NO: 546 - RNA, 21 nt, synthetic construct
  source 1..21: mol_type = other RNA
  modified_base 1: mod_base = OTHER; note = 2'-deoxy-2'-fluoroadenosine-3'-phosphorothioate
  modified_base 2: mod_base = OTHER; note = 2'-O-methyladenosine-3'-phosphorothioate
  modified_base 3: mod_base = OTHER; note = 2'-deoxy-2'-fluorocytidine-3'-phosphate
  modified_base 4: mod_base = OTHER; note = 2'-O-methyladenosine-3'-phosphate
  modified_base 5: mod_base = OTHER; note = 2'-deoxy-2'-fluoroguanosine-3'-phosphate
  modified_base 6: mod_base = OTHER; note = 2'-O-methyluridine-3'-phosphate
  modified_base 7: mod_base = OTHER; note = 2'-deoxy-2'-fluoroguanosine-3'-phosphate
  modified_base 8: mod_base = OTHER; note = 2'-O-methyluridine-3'-phosphate
  modified_base 9: mod_base = OTHER; note = 2'-deoxy-2'-fluorouridine-3'-phosphate
  modified_base 10: mod_base = OTHER; note = 2'-deoxy-2'-fluorocytidine-3'-phosphate
  modified_base 11: mod_base = OTHER; note = 2'-deoxy-2'-fluorouridine-3'-phosphate
  modified_base 12: mod_base = OTHER; note = 2'-O-methyluridine-3'-phosphate
  modified_base 13: mod_base = OTHER; note = 2'-deoxy-2'-fluoroguanosine-3'-phosphate
  modified_base 14: mod_base = OTHER; note = 2'-O-methylcytidine-3'-phosphate
  modified_base 15: mod_base = OTHER; note = 2'-deoxy-2'-fluorouridine-3'-phosphate
  modified_base 16: mod_base = OTHER; note = 2'-O-methylcytidine-3'-phosphate
  modified_base 17: mod_base = OTHER; note = 2'-deoxy-2'-fluorouridine-3'-phosphate
  modified_base 18: mod_base = OTHER; note = 2'-O-methyladenosine-3'-phosphate
  modified_base 19: mod_base = OTHER; note = 2'-deoxy-2'-fluorouridine-3'-phosphate
  modified_base 20: mod_base = OTHER; note = 1-deoxy-1-(adenin-9-yl)-alpha-L-threofuranose 2-phosphate
  modified_base 21: mod_base = OTHER; note = 2'-deoxy-2'-fluoroadenosine-3'-phosphate conjugated at the 3'-end to an L96 ligand
aacagtgttcttgctctataa

SEQ ID NO: 547 - RNA, 21 nt, synthetic construct
  source 1..21: mol_type = other RNA
  modified_base 1: mod_base = OTHER; note = 2'-deoxy-2'-fluoroadenosine-3'-phosphorothioate
  modified_base 2: mod_base = OTHER; note = 2'-O-methyladenosine-3'-phosphorothioate
  modified_base 3: mod_base = OTHER; note = 2'-deoxy-2'-fluorocytidine-3'-phosphate
  modified_base 4: mod_base = OTHER; note = 2'-O-methyladenosine-3'-phosphate
  modified_base 5: mod_base = OTHER; note = 2'-deoxy-2'-fluoroguanosine-3'-phosphate
  modified_base 6: mod_base = OTHER; note = 2'-O-methyluridine-3'-phosphate
  modified_base 7: mod_base = OTHER; note = 2'-deoxy-2'-fluoroguanosine-3'-phosphate
  modified_base 8: mod_base = OTHER; note = 2'-O-methyluridine-3'-phosphate
  modified_base 9: mod_base = OTHER; note = 2'-deoxy-2'-fluorouridine-3'-phosphate
  modified_base 10: mod_base = OTHER; note = 2'-deoxy-2'-fluorocytidine-3'-phosphate
  modified_base 11: mod_base = OTHER; note = 2'-deoxy-2'-fluorouridine-3'-phosphate
  modified_base 12: mod_base = OTHER; note = 2'-O-methyluridine-3'-phosphate
  modified_base 13: mod_base = OTHER; note = 2'-deoxy-2'-fluoroguanosine-3'-phosphate
  modified_base 14: mod_base = OTHER; note = 2'-O-methylcytidine-3'-phosphate
  modified_base 15: mod_base = OTHER; note = 2'-deoxy-2'-fluorouridine-3'-phosphate
  modified_base 16: mod_base = OTHER; note = 2'-O-methylcytidine-3'-phosphate
  modified_base 17: mod_base = OTHER; note = 2'-deoxy-2'-fluorouridine-3'-phosphate
  modified_base 18: mod_base = OTHER; note = 2'-O-methyladenosine-3'-phosphate
  modified_base 19: mod_base = OTHER; note = 2'-deoxy-2'-fluorouridine-3'-phosphate
  modified_base 20: mod_base = OTHER; note = 2'-O-methyladenosine-3'-phosphate
  modified_base 21: mod_base = OTHER; note = 1-deoxy-1-(adenin-9-yl)-alpha-L-threofuranose 2-phosphate conjugated at the 3'-end to an L96 ligand
aacagtgttcttgctctataa

SEQ ID NO: 548 - RNA, 23 nt, synthetic construct
  source 1..23: mol_type = other RNA
  modified_base 1: mod_base = OTHER; note = 2'-O-methyluridine-3'-phosphorothioate
  modified_base 2: mod_base = OTHER; note = 2'-deoxy-2'-fluorouridine-3'-phosphorothioate
  modified_base 3: mod_base = OTHER; note = 2'-O-methyladenosine-3'-phosphate
  modified_base 4: mod_base = OTHER; note = 2'-deoxy-2'-fluorouridine-3'-phosphate
  modified_base 5: mod_base = OTHER; note = 2'-O-methyladenosine-3'-phosphate
  modified_base 6: mod_base = OTHER; note = 2'-deoxy-2'-fluoroguanosine-3'-phosphate
  modified_base 7: mod_base = OTHER; note = 2'-O-methyladenosine-3'-phosphate
  modified_base 8: mod_base = OTHER; note = 2'-deoxy-2'-fluoroguanosine-3'-phosphate
  modified_base 9: mod_base = OTHER; note = 2'-O-methylcytidine-3'-phosphate
  modified_base 10: mod_base = OTHER; note = 2'-deoxy-2'-fluoroadenosine-3'-phosphate
  modified_base 11: mod_base = OTHER; note = 2'-O-methyladenosine-3'-phosphate
  modified_base 12: mod_base = OTHER; note = 2'-O-methylguanosine-3'-phosphate
  modified_base 13: mod_base = OTHER; note = 2'-O-methyladenosine-3'-phosphate
  modified_base 14: mod_base = OTHER; note = 2'-deoxy-2'-fluoroadenosine-3'-phosphate
  modified_base 15: mod_base = OTHER; note = 2'-O-methylcytidine-3'-phosphate
  modified_base 16: mod_base = OTHER; note = 2'-deoxy-2'-fluoroadenosine-3'-phosphate
  modified_base 17: mod_base = OTHER; note = 2'-O-methylcytidine-3'-phosphate
  modified_base 18: mod_base = OTHER; note = 2'-deoxy-2'-fluorouridine-3'-phosphate
  modified_base 19: mod_base = OTHER; note = 2'-O-methylguanosine-3'-phosphate
  modified_base 20: mod_base = OTHER; note = 2'-deoxy-2'-fluorouridine-3'-phosphate
  modified_base 21: mod_base = OTHER; note = 2'-O-methyluridine-3'-phosphorothioate
  modified_base 22: mod_base = OTHER; note = 2'-O-methyluridine-3'-phosphorothioate
  modified_base 23: mod_base = OTHER; note = 2'-O-methyluridine
ttatagagcaagaacactgtttt

SEQ ID NO: 549 - RNA, 23 nt, synthetic construct
  source 1..23: mol_type = other RNA
  modified_base 1: mod_base = OTHER; note = 2'-O-methyluridine-3'-phosphorothioate
  modified_base 2: mod_base = OTHER; note = 2'-deoxy-2'-fluorouridine-3'-phosphorothioate
  modified_base 3: mod_base = OTHER; note = 2'-O-methyladenosine-3'-phosphate
  modified_base 4: mod_base = OTHER; note = 2'-deoxy-2'-fluorouridine-3'-phosphate
  modified_base 5: mod_base = OTHER; note = 2'-O-methyladenosine-3'-phosphate
  modified_base 6: mod_base = OTHER; note = 2'-deoxy-2'-fluoroguanosine-3'-phosphate
  modified_base 7: mod_base = OTHER; note = 2'-O-methyladenosine-3'-phosphate
  modified_base 8: mod_base = OTHER; note = 2'-deoxy-2'-fluoroguanosine-3'-phosphate
  modified_base 9: mod_base = OTHER; note = 2'-O-methylcytidine-3'-phosphate
  modified_base 10: mod_base = OTHER; note = 2'-deoxy-2'-fluoroadenosine-3'-phosphate
  modified_base 11: mod_base = OTHER; note = 2'-O-methyladenosine-3'-phosphate
  modified_base 12: mod_base = OTHER; note = 2'-O-methylguanosine-3'-phosphate
  modified_base 13: mod_base = OTHER; note = 2'-O-methyladenosine-3'-phosphate
  modified_base 14: mod_base = OTHER; note = 2'-deoxy-2'-fluoroadenosine-3'-phosphate
  modified_base 15: mod_base = OTHER; note = 2'-O-methylcytidine-3'-phosphate
  modified_base 16: mod_base = OTHER; note = 2'-deoxy-2'-fluoroadenosine-3'-phosphate
  modified_base 17: mod_base = OTHER; note = 2'-O-methylcytidine-3'-phosphate
  modified_base 18: mod_base = OTHER; note = 2'-deoxy-2'-fluorouridine-3'-phosphate
  modified_base 19: mod_base = OTHER; note = 2'-O-methylguanosine-3'-phosphate
  modified_base 20: mod_base = OTHER; note = 2'-deoxy-2'-fluorouridine-3'-phosphate
  modified_base 21: mod_base = OTHER; note = 2'-O-methyluridine-3'-phosphorothioate
  modified_base 22: mod_base = OTHER; note = 2'-O-methyluridine-3'-phosphorothioate
  modified_base 23: mod_base = OTHER; note = 2'-O-methyluridine
ttatagagcaagaacactgtttt

SEQ ID NO: 550 - RNA, 23 nt, synthetic construct
  source 1..23: mol_type = other RNA
  modified_base 1: mod_base = OTHER; note = 2'-O-methyluridine-3'-phosphorothioate
  modified_base 2: mod_base = OTHER; note = 2'-deoxy-2'-fluorouridine-3'-phosphorothioate
  modified_base 3: mod_base = OTHER; note = 2'-O-methyladenosine-3'-phosphate
  modified_base 4: mod_base = OTHER; note = 2'-deoxy-2'-fluorouridine-3'-phosphate
  modified_base 5: mod_base = OTHER; note = 2'-O-methyladenosine-3'-phosphate
  modified_base 6: mod_base = OTHER; note = 2'-deoxy-2'-fluoroguanosine-3'-phosphate
  modified_base 7: mod_base = OTHER; note = 2'-O-methyladenosine-3'-phosphate
  modified_base 8: mod_base = OTHER; note = 2'-deoxy-2'-fluoroguanosine-3'-phosphate
  modified_base 9: mod_base = OTHER; note = 2'-O-methylcytidine-3'-phosphate
  modified_base 10: mod_base = OTHER; note = 2'-deoxy-2'-fluoroadenosine-3'-phosphate
  modified_base 11: mod_base = OTHER; note = 2'-O-methyladenosine-3'-phosphate
  modified_base 12: mod_base = OTHER; note = 2'-O-methylguanosine-3'-phosphate
  modified_base 13: mod_base = OTHER; note = 2'-O-methyladenosine-3'-phosphate
  modified_base 14: mod_base = OTHER; note = 2'-deoxy-2'-fluoroadenosine-3'-phosphate
  modified_base 15: mod_base = OTHER; note = 2'-O-methylcytidine-3'-phosphate
  modified_base 16: mod_base = OTHER; note = 2'-deoxy-2'-fluoroadenosine-3'-phosphate
  modified_base 17: mod_base = OTHER; note = 2'-O-methylcytidine-3'-phosphate
  modified_base 18: mod_base = OTHER; note = 2'-deoxy-2'-fluorouridine-3'-phosphate
  modified_base 19: mod_base = OTHER; note = 2'-O-methylguanosine-3'-phosphate
  modified_base 20: mod_base = OTHER; note = 2'-deoxy-2'-fluorouridine-3'-phosphate
  modified_base 21: mod_base = OTHER; note = 2'-O-methyluridine-3'-phosphorothioate
  modified_base 22: mod_base = OTHER; note = 2'-O-methyluridine-3'-phosphorothioate
  modified_base 23: mod_base = OTHER; note = 2'-O-methyluridine
ttatagagcaagaacactgtttt

SEQ ID NO: 551 - RNA, 23 nt, synthetic construct
  source 1..23: mol_type = other RNA
  modified_base 1: mod_base = OTHER; note = 2'-O-methyluridine-3'-phosphorothioate
  modified_base 2: mod_base = OTHER; note = 2'-deoxy-2'-fluorouridine-3'-phosphorothioate
  modified_base 3: mod_base = OTHER; note = 2'-O-methyladenosine-3'-phosphate
  modified_base 4: mod_base = OTHER; note = 2'-deoxy-2'-fluorouridine-3'-phosphate
  modified_base 5: mod_base = OTHER; note = 2'-O-methyladenosine-3'-phosphate
  modified_base 6: mod_base = OTHER; note = 2'-deoxy-2'-fluoroguanosine-3'-phosphate
  modified_base 7: mod_base = OTHER; note = 2'-O-methyladenosine-3'-phosphate
  modified_base 8: mod_base = OTHER; note = 2'-deoxy-2'-fluoroguanosine-3'-phosphate
  modified_base 9: mod_base = OTHER; note = 2'-O-methylcytidine-3'-phosphate
  modified_base 10: mod_base = OTHER; note = 2'-deoxy-2'-fluoroadenosine-3'-phosphate
  modified_base 11: mod_base = OTHER; note = 2'-O-methyladenosine-3'-phosphate
  modified_base 12: mod_base = OTHER; note = 2'-O-methylguanosine-3'-phosphate
  modified_base 13: mod_base = OTHER; note = 2'-O-methyladenosine-3'-phosphate
  modified_base 14: mod_base = OTHER; note = 2'-deoxy-2'-fluoroadenosine-3'-phosphate
  modified_base 15: mod_base = OTHER; note = 2'-O-methylcytidine-3'-phosphate
  modified_base 16: mod_base = OTHER; note = 2'-deoxy-2'-fluoroadenosine-3'-phosphate
  modified_base 17: mod_base = OTHER; note = 2'-O-methylcytidine-3'-phosphate
  modified_base 18: mod_base = OTHER; note = 2'-deoxy-2'-fluorouridine-3'-phosphate
  modified_base 19: mod_base = OTHER; note = 2'-O-methylguanosine-3'-phosphate
  modified_base 20: mod_base = OTHER; note = 2'-deoxy-2'-fluorouridine-3'-phosphate
  modified_base 21: mod_base = OTHER; note = 2'-O-methyluridine-3'-phosphorothioate
  modified_base 22: mod_base = OTHER; note = 2'-O-methyluridine-3'-phosphorothioate
  modified_base 23: mod_base = OTHER; note = 2'-O-methyluridine
ttatagagcaagaacactgtttt

SEQ ID NO: 552 - RNA, 23 nt, synthetic construct
  source 1..23: mol_type = other RNA
  modified_base 1: mod_base = OTHER; note = 2'-O-methyluridine-3'-phosphorothioate
  modified_base 2: mod_base = OTHER; note = 2'-deoxy-2'-fluorouridine-3'-phosphorothioate
  modified_base 3: mod_base = OTHER; note = 2'-O-methyladenosine-3'-phosphate
  modified_base 4: mod_base = OTHER; note = 2'-deoxy-2'-fluorouridine-3'-phosphate
  modified_base 5: mod_base = OTHER; note = 2'-O-methyladenosine-3'-phosphate
  modified_base 6: mod_base = OTHER; note = 2'-deoxy-2'-fluoroguanosine-3'-phosphate
  modified_base 7: mod_base = OTHER; note = 2'-O-methyladenosine-3'-phosphate
  modified_base 8: mod_base = OTHER; note = 2'-deoxy-2'-fluoroguanosine-3'-phosphate
  modified_base 9: mod_base = OTHER; note = 2'-O-methylcytidine-3'-phosphate
  modified_base 10: mod_base = OTHER; note = 2'-deoxy-2'-fluoroadenosine-3'-phosphate
  modified_base 11: mod_base = OTHER; note = 2'-O-methyladenosine-3'-phosphate
  modified_base 12: mod_base = OTHER; note = 2'-O-methylguanosine-3'-phosphate
  modified_base 13: mod_base = OTHER; note = 2'-O-methyladenosine-3'-phosphate
  modified_base 14: mod_base = OTHER; note = 2'-deoxy-2'-fluoroadenosine-3'-phosphate
  modified_base 15: mod_base = OTHER; note = 2'-O-methylcytidine-3'-phosphate
  modified_base 16: mod_base = OTHER; note = 2'-deoxy-2'-fluoroadenosine-3'-phosphate
  modified_base 17: mod_base = OTHER; note = 2'-O-methylcytidine-3'-phosphate
  modified_base 18: mod_base = OTHER; note = 2'-deoxy-2'-fluorouridine-3'-phosphate
  modified_base 19: mod_base = OTHER; note = 2'-O-methylguanosine-3'-phosphate
  modified_base 20: mod_base = OTHER; note = 2'-deoxy-2'-fluorouridine-3'-phosphate
  modified_base 21: mod_base = OTHER; note = 2'-O-methyluridine-3'-phosphorothioate
  modified_base 22: mod_base = OTHER; note = 2'-O-methyluridine-3'-phosphorothioate
  modified_base 23: mod_base = OTHER; note = 2'-O-methyluridine
ttatagagcaagaacactgtttt

SEQ ID NO: 553 - RNA, 23 nt, synthetic construct
  source 1..23: mol_type = other RNA
  modified_base 1: mod_base = OTHER; note = 2'-O-methyluridine-3'-phosphorothioate
  modified_base 2: mod_base = OTHER; note = 2'-deoxy-2'-fluorouridine-3'-phosphorothioate
  modified_base 3: mod_base = OTHER; note = 2'-O-methyladenosine-3'-phosphate
  modified_base 4: mod_base = OTHER; note = 2'-deoxy-2'-fluorouridine-3'-phosphate
  modified_base 5: mod_base = OTHER; note = 2'-O-methyladenosine-3'-phosphate
  modified_base 6: mod_base = OTHER; note = 2'-deoxy-2'-fluoroguanosine-3'-phosphate
  modified_base 7: mod_base = OTHER; note = 2'-O-methyladenosine-3'-phosphate
  modified_base 8: mod_base = OTHER; note = 2'-deoxy-2'-fluoroguanosine-3'-phosphate
  modified_base 9: mod_base = OTHER; note = 2'-O-methylcytidine-3'-phosphate
  modified_base 10: mod_base = OTHER; note = 2'-deoxy-2'-fluoroadenosine-3'-phosphate
  modified_base 11: mod_base = OTHER; note = 2'-O-methyladenosine-3'-phosphate
  modified_base 12: mod_base = OTHER; note = 2'-O-methylguanosine-3'-phosphate
  modified_base 13: mod_base = OTHER; note = 2'-O-methyladenosine-3'-phosphate
  modified_base 14: mod_base = OTHER; note = 2'-deoxy-2'-fluoroadenosine-3'-phosphate
  modified_base 15: mod_base = OTHER; note = 2'-O-methylcytidine-3'-phosphate
  modified_base 16: mod_base = OTHER; note = 2'-deoxy-2'-fluoroadenosine-3'-phosphate
  modified_base 17: mod_base = OTHER; note = 2'-O-methylcytidine-3'-phosphate
  modified_base 18: mod_base = OTHER; note = 2'-deoxy-2'-fluorouridine-3'-phosphate
  modified_base 19: mod_base = OTHER; note = 2'-O-methylguanosine-3'-phosphate
  modified_base 20: mod_base = OTHER; note = 2'-deoxy-2'-fluorouridine-3'-phosphate
  modified_base 21: mod_base = OTHER; note = 2'-O-methyluridine-3'-phosphorothioate
  modified_base 22: mod_base = OTHER; note = 2'-O-methyluridine-3'-phosphorothioate
  modified_base 23: mod_base = OTHER; note = 2'-O-methyluridine
ttatagagcaagaacactgtttt

SEQ ID NO: 554 - RNA, 23 nt, synthetic construct
  source 1..23: mol_type = other RNA
  modified_base 1: mod_base = OTHER; note = 2'-O-methyluridine-3'-phosphorothioate
  modified_base 2: mod_base = OTHER; note = 2'-deoxy-2'-fluorouridine-3'-phosphorothioate
  modified_base 3: mod_base = OTHER; note = 2'-O-methyladenosine-3'-phosphate
  modified_base 4: mod_base = OTHER; note = 2'-deoxy-2'-fluorouridine-3'-phosphate
  modified_base 5: mod_base = OTHER; note = 2'-O-methyladenosine-3'-phosphate
  modified_base 6: mod_base = OTHER; note = 2'-deoxy-2'-fluoroguanosine-3'-phosphate
  modified_base 7: mod_base = OTHER; note = 2'-O-methyladenosine-3'-phosphate
  modified_base 8: mod_base = OTHER; note = 2'-deoxy-2'-fluoroguanosine-3'-phosphate
  modified_base 9: mod_base = OTHER; note = 2'-O-methylcytidine-3'-phosphate
  modified_base 10: mod_base = OTHER; note = 2'-deoxy-2'-fluoroadenosine-3'-phosphate
  modified_base 11: mod_base = OTHER; note = 2'-O-methyladenosine-3'-phosphate
  modified_base 12: mod_base = OTHER; note = 2'-O-methylguanosine-3'-phosphate
  modified_base 13: mod_base = OTHER; note = 2'-O-methyladenosine-3'-phosphate
  modified_base 14: mod_base = OTHER; note = 2'-deoxy-2'-fluoroadenosine-3'-phosphate
  modified_base 15: mod_base = OTHER; note = 2'-O-methylcytidine-3'-phosphate
  modified_base 16: mod_base = OTHER; note = 2'-deoxy-2'-fluoroadenosine-3'-phosphate
  modified_base 17: mod_base = OTHER; note = 2'-O-methylcytidine-3'-phosphate
  modified_base 18: mod_base = OTHER; note = 2'-deoxy-2'-fluorouridine-3'-phosphate
  modified_base 19: mod_base = OTHER; note = 2'-O-methylguanosine-3'-phosphate
  modified_base 20: mod_base = OTHER; note = 2'-deoxy-2'-fluorouridine-3'-phosphate
  modified_base 21: mod_base = OTHER; note = 2'-O-methyluridine-3'-phosphorothioate
  modified_base 22: mod_base = OTHER; note = 2'-O-methyluridine-3'-phosphorothioate
  modified_base 23: mod_base = OTHER; note = 2'-O-methyluridine
ttatagagcaagaacactgtttt

SEQ ID NO: 555 - RNA, 23 nt, synthetic construct
  source 1..23: mol_type = other RNA
  modified_base 1: mod_base = OTHER; note = 2'-O-methyluridine-3'-phosphorothioate
  modified_base 2: mod_base = OTHER; note = 2'-deoxy-2'-fluorouridine-3'-phosphorothioate
  modified_base 3: mod_base = OTHER; note = 2'-O-methyladenosine-3'-phosphate
  modified_base 4: mod_base = OTHER; note = 2'-deoxy-2'-fluorouridine-3'-phosphate
  modified_base 5: mod_base = OTHER; note = 2'-O-methyladenosine-3'-phosphate
  modified_base 6: mod_base = OTHER; note = 2'-deoxy-2'-fluoroguanosine-3'-phosphate
  modified_base 7: mod_base = OTHER; note = 2'-O-methyladenosine-3'-phosphate
  modified_base 8: mod_base = OTHER; note = 2'-deoxy-2'-fluoroguanosine-3'-phosphate
  modified_base 9: mod_base = OTHER; note = 2'-O-methylcytidine-3'-phosphate
  modified_base 10: mod_base = OTHER; note = 2'-deoxy-2'-fluoroadenosine-3'-phosphate
  modified_base 11: mod_base = OTHER; note = 2'-O-methyladenosine-3'-phosphate
  modified_base 12: mod_base = OTHER; note = 2'-O-methylguanosine-3'-phosphate
  modified_base 13: mod_base = OTHER; note = 2'-O-methyladenosine-3'-phosphate
  modified_base 14: mod_base = OTHER; note = 2'-deoxy-2'-fluoroadenosine-3'-phosphate
  modified_base 15: mod_base = OTHER; note = 2'-O-methylcytidine-3'-phosphate
  modified_base 16: mod_base = OTHER; note = 2'-deoxy-2'-fluoroadenosine-3'-phosphate
  modified_base 17: mod_base = OTHER; note = 2'-O-methylcytidine-3'-phosphate
  modified_base 18: mod_base = OTHER; note = 2'-deoxy-2'-fluorouridine-3'-phosphate
  modified_base 19: mod_base = OTHER; note = 2'-O-methylguanosine-3'-phosphate
  modified_base 20: mod_base = OTHER; note = 2'-deoxy-2'-fluorouridine-3'-phosphate
  modified_base 21: mod_base = OTHER; note = 2'-O-methyluridine-3'-phosphorothioate
  modified_base 22: mod_base = OTHER; note = 2'-O-methyluridine-3'-phosphorothioate
  modified_base 23: mod_base = OTHER; note = 2'-O-methyluridine
ttatagagcaagaacactgtttt

SEQ ID NO: 556 - RNA, 23 nt, synthetic construct
  source 1..23: mol_type = other RNA
  modified_base 1: mod_base = OTHER; note = 2'-O-methyluridine-3'-phosphorothioate
  modified_base 2: mod_base = OTHER; note = 2'-deoxy-2'-fluorouridine-3'-phosphorothioate
  modified_base 3: mod_base = OTHER; note = 2'-O-methyladenosine-3'-phosphate
  modified_base 4: mod_base = OTHER; note = 2'-deoxy-2'-fluorouridine-3'-phosphate
  modified_base 5: mod_base = OTHER; note = 2'-O-methyladenosine-3'-phosphate
  modified_base 6: mod_base = OTHER; note = 2'-deoxy-2'-fluoroguanosine-3'-phosphate
  modified_base 7: mod_base = OTHER; note = 2'-O-methyladenosine-3'-phosphate
  modified_base 8: mod_base = OTHER; note = 2'-deoxy-2'-fluoroguanosine-3'-phosphate
  modified_base 9: mod_base = OTHER; note = 2'-O-methylcytidine-3'-phosphate
  modified_base 10: mod_base = OTHER; note = 2'-deoxy-2'-fluoroadenosine-3'-phosphate
  modified_base 11: mod_base = OTHER; note = 2'-O-methyladenosine-3'-phosphate
  modified_base 12: mod_base = OTHER; note = 2'-O-methylguanosine-3'-phosphate
  modified_base 13: mod_base = OTHER; note = 2'-O-methyladenosine-3'-phosphate
  modified_base 14: mod_base = OTHER; note = 2'-deoxy-2'-fluoroadenosine-3'-phosphate
  modified_base 15: mod_base = OTHER; note = 2'-O-methylcytidine-3'-phosphate
  modified_base 16: mod_base = OTHER; note = 2'-deoxy-2'-fluoroadenosine-3'-phosphate
  modified_base 17: mod_base = OTHER; note = 2'-O-methylcytidine-3'-phosphate
  modified_base 18: mod_base = OTHER; note = 2'-deoxy-2'-fluorouridine-3'-phosphate
  modified_base 19: mod_base = OTHER; note = 2'-O-methylguanosine-3'-phosphate
  modified_base 20: mod_base = OTHER; note = 2'-deoxy-2'-fluorouridine-3'-phosphate
  modified_base 21: mod_base = OTHER; note = 2'-O-methyluridine-3'-phosphorothioate
  modified_base 22: mod_base = OTHER; note = 2'-O-methyluridine-3'-phosphorothioate
  modified_base 23: mod_base = OTHER; note = 2'-O-methyluridine
ttatagagcaagaacactgtttt

SEQ ID NO: 557 - RNA, 23 nt, synthetic construct
  source 1..23: mol_type = other RNA
  modified_base 1: mod_base = OTHER; note = 2'-O-methyluridine-3'-phosphorothioate
  modified_base 2: mod_base = OTHER; note = 2'-deoxy-2'-fluorouridine-3'-phosphorothioate
  modified_base 3: mod_base = OTHER; note = 2'-O-methyladenosine-3'-phosphate
  modified_base 4: mod_base = OTHER; note = 2'-deoxy-2'-fluorouridine-3'-phosphate
  modified_base 5: mod_base = OTHER; note = 2'-O-methyladenosine-3'-phosphate
  modified_base 6: mod_base = OTHER; note = 2'-deoxy-2'-fluoroguanosine-3'-phosphate
  modified_base 7: mod_base = OTHER; note = 2'-O-methyladenosine-3'-phosphate
  modified_base 8: mod_base = OTHER; note = 2'-deoxy-2'-fluoroguanosine-3'-phosphate
  modified_base 9: mod_base = OTHER; note = 2'-O-methylcytidine-3'-phosphate
  modified_base 10: mod_base = OTHER; note = 2'-deoxy-2'-fluoroadenosine-3'-phosphate
  modified_base 11: mod_base = OTHER; note = 2'-O-methyladenosine-3'-phosphate
  modified_base 12: mod_base = OTHER; note = 2'-O-methylguanosine-3'-phosphate
  modified_base 13: mod_base = OTHER; note = 2'-O-methyladenosine-3'-phosphate
  modified_base 14: mod_base = OTHER; note = 2'-deoxy-2'-fluoroadenosine-3'-phosphate
  modified_base 15: mod_base = OTHER; note = 2'-O-methylcytidine-3'-phosphate
  modified_base 16: mod_base = OTHER; note = 2'-deoxy-2'-fluoroadenosine-3'-phosphate
  modified_base 17: mod_base = OTHER; note = 2'-O-methylcytidine-3'-phosphate
  modified_base 18: mod_base = OTHER; note = 2'-deoxy-2'-fluorouridine-3'-phosphate
  modified_base 19: mod_base = OTHER; note = 2'-O-methylguanosine-3'-phosphate
  modified_base 20: mod_base = OTHER; note = 2'-deoxy-2'-fluorouridine-3'-phosphate
  modified_base 21: mod_base = OTHER; note = 2'-O-methyluridine-3'-phosphorothioate
  modified_base 22: mod_base = OTHER; note = 2'-O-methyluridine-3'-phosphorothioate
  modified_base 23: mod_base = OTHER; note = 2'-O-methyluridine
ttatagagcaagaacactgtttt

SEQ ID NO: 558 - RNA, 23 nt, synthetic construct
  source 1..23: mol_type = other RNA
  modified_base 1: mod_base = OTHER; note = 2'-O-methyluridine-3'-phosphorothioate
  modified_base 2: mod_base = OTHER; note = 2'-deoxy-2'-fluorouridine-3'-phosphorothioate
  modified_base 3: mod_base = OTHER; note = 2'-O-methyladenosine-3'-phosphate
  modified_base 4: mod_base = OTHER; note = 2'-deoxy-2'-fluorouridine-3'-phosphate
  modified_base 5: mod_base = OTHER; note = 2'-O-methyladenosine-3'-phosphate
  modified_base 6: mod_base = OTHER; note = 2'-deoxy-2'-fluoroguanosine-3'-phosphate
  modified_base 7: mod_base = OTHER; note = 2'-O-methyladenosine-3'-phosphate
  modified_base 8: mod_base = OTHER; note = 2'-deoxy-2'-fluoroguanosine-3'-phosphate
  modified_base 9: mod_base = OTHER; note = 2'-O-methylcytidine-3'-phosphate
  modified_base 10: mod_base = OTHER; note = 2'-deoxy-2'-fluoroadenosine-3'-phosphate
  modified_base 11: mod_base = OTHER; note = 2'-O-methyladenosine-3'-phosphate
  modified_base 12: mod_base = OTHER; note = 2'-O-methylguanosine-3'-phosphate
  modified_base 13: mod_base = OTHER; note = 2'-O-methyladenosine-3'-phosphate
  modified_base 14: mod_base = OTHER; note = 2'-deoxy-2'-fluoroadenosine-3'-phosphate
  modified_base 15: mod_base = OTHER; note = 2'-O-methylcytidine-3'-phosphate
  modified_base 16: mod_base = OTHER; note = 2'-deoxy-2'-fluoroadenosine-3'-phosphate
  modified_base 17: mod_base = OTHER; note = 2'-O-methylcytidine-3'-phosphate
  modified_base 18: mod_base = OTHER; note = 2'-deoxy-2'-fluorouridine-3'-phosphate
  modified_base 19: mod_base = OTHER; note = 2'-O-methylguanosine-3'-phosphate
  modified_base 20: mod_base = OTHER; note = 2'-deoxy-2'-fluorouridine-3'-phosphate
  modified_base 21: mod_base = OTHER; note = 2'-O-methyluridine-3'-phosphorothioate
  modified_base 22: mod_base = OTHER; note = 2'-O-methyluridine-3'-phosphorothioate
  modified_base 23: mod_base = OTHER; note = 2'-O-methyluridine
ttatagagcaagaacactgtttt

SEQ ID NO: 559 - RNA, 23 nt, synthetic construct
  source 1..23: mol_type = other RNA
  modified_base 1: mod_base = OTHER; note = 2'-O-methyluridine-3'-phosphorothioate
  modified_base 2: mod_base = OTHER; note = 2'-deoxy-2'-fluorouridine-3'-phosphorothioate
  modified_base 3: mod_base = OTHER; note = 2'-O-methyladenosine-3'-phosphate
  modified_base 4: mod_base = OTHER; note = 2'-deoxy-2'-fluorouridine-3'-phosphate
  modified_base 5: mod_base = OTHER; note = 2'-O-methyladenosine-3'-phosphate
  modified_base 6: mod_base = OTHER; note = 2'-deoxy-2'-fluoroguanosine-3'-phosphate
  modified_base 7: mod_base = OTHER; note = 2'-O-methyladenosine-3'-phosphate
  modified_base 8: mod_base = OTHER; note = 2'-deoxy-2'-fluoroguanosine-3'-phosphate
  modified_base 9: mod_base = OTHER; note = 2'-O-methylcytidine-3'-phosphate
  modified_base 10: mod_base = OTHER; note = 2'-deoxy-2'-fluoroadenosine-3'-phosphate
  modified_base 11: mod_base = OTHER; note = 2'-O-methyladenosine-3'-phosphate
  modified_base 12: mod_base = OTHER; note = 2'-O-methylguanosine-3'-phosphate
  modified_base 13: mod_base = OTHER; note = 2'-O-methyladenosine-3'-phosphate
  modified_base 14: mod_base = OTHER; note = 2'-deoxy-2'-fluoroadenosine-3'-phosphate
  modified_base 15: mod_base = OTHER; note = 2'-O-methylcytidine-3'-phosphate
  modified_base 16: mod_base = OTHER; note = 2'-deoxy-2'-fluoroadenosine-3'-phosphate
  modified_base 17: mod_base = OTHER; note = 2'-O-methylcytidine-3'-phosphate
  modified_base 18: mod_base = OTHER; note = 2'-deoxy-2'-fluorouridine-3'-phosphate
  modified_base 19: mod_base = OTHER; note = 2'-O-methylguanosine-3'-phosphate
  modified_base 20: mod_base = OTHER; note = 2'-deoxy-2'-fluorouridine-3'-phosphate
  modified_base 21: mod_base = OTHER; note = 2'-O-methyluridine-3'-phosphorothioate
  modified_base 22: mod_base = OTHER; note = 2'-O-methyluridine-3'-phosphorothioate
  modified_base 23: mod_base = OTHER; note = 2'-O-methyluridine
ttatagagcaagaacactgtttt

SEQ ID NO: 560 - RNA, 23 nt, synthetic construct
  source 1..23: mol_type = other RNA
  modified_base 1: mod_base = OTHER; note = 2'-O-methyluridine-3'-phosphorothioate
  modified_base 2: mod_base = OTHER; note = 2'-deoxy-2'-fluorouridine-3'-phosphorothioate
  modified_base 3: mod_base = OTHER; note = 2'-O-methyladenosine-3'-phosphate
  modified_base 4: mod_base = OTHER; note = 2'-deoxy-2'-fluorouridine-3'-phosphate
  modified_base 5: mod_base = OTHER; note = 2'-O-methyladenosine-3'-phosphate
  modified_base 6: mod_base = OTHER; note = 2'-deoxy-2'-fluoroguanosine-3'-phosphate
  modified_base 7: mod_base = OTHER; note = 2'-O-methyladenosine-3'-phosphate
  modified_base 8: mod_base = OTHER; note = 2'-deoxy-2'-fluoroguanosine-3'-phosphate
  modified_base 9: mod_base = OTHER; note = 2'-O-methylcytidine-3'-phosphate
  modified_base 10: mod_base = OTHER; note = 2'-deoxy-2'-fluoroadenosine-3'-phosphate
  modified_base 11: mod_base = OTHER; note = 2'-O-methyladenosine-3'-phosphate
  modified_base 12: mod_base = OTHER; note = 2'-O-methylguanosine-3'-phosphate
  modified_base 13: mod_base = OTHER; note = 2'-O-methyladenosine-3'-phosphate
  modified_base 14: mod_base = OTHER; note = 2'-deoxy-2'-fluoroadenosine-3'-phosphate
  modified_base 15: mod_base = OTHER; note = 2'-O-methylcytidine-3'-phosphate
  modified_base 16: mod_base = OTHER; note = 2'-deoxy-2'-fluoroadenosine-3'-phosphate
  modified_base 17: mod_base = OTHER; note = 2'-O-methylcytidine-3'-phosphate
  modified_base 18: mod_base = OTHER; note = 2'-deoxy-2'-fluorouridine-3'-phosphate
  modified_base 19: mod_base = OTHER; note = 2'-O-methylguanosine-3'-phosphate
  modified_base 20: mod_base = OTHER; note = 2'-deoxy-2'-fluorouridine-3'-phosphate
  modified_base 21: mod_base = OTHER; note = 2'-O-methyluridine-3'-phosphorothioate
  modified_base 22: mod_base = OTHER; note = 2'-O-methyluridine-3'-phosphorothioate
  modified_base 23: mod_base = OTHER; note = 2'-O-methyluridine
ttatagagcaagaacactgtttt

SEQ ID NO: 561 - RNA, 23 nt, synthetic construct
  source 1..23: mol_type = other RNA
  modified_base 1: mod_base = OTHER; note = 2'-O-methyluridine-3'-phosphorothioate
  modified_base 2: mod_base = OTHER; note = 2'-deoxy-2'-fluorouridine-3'-phosphorothioate
  modified_base 3: mod_base = OTHER; note = 2'-O-methyladenosine-3'-phosphate
  modified_base 4: mod_base = OTHER; note = 2'-deoxy-2'-fluorouridine-3'-phosphate
  modified_base 5: mod_base = OTHER; note = 2'-O-methyladenosine-3'-phosphate
  modified_base 6: mod_base = OTHER; note = 2'-deoxy-2'-fluoroguanosine-3'-phosphate
  modified_base 7: mod_base = OTHER; note = 2'-O-methyladenosine-3'-phosphate
  modified_base 8: mod_base = OTHER; note = 2'-deoxy-2'-fluoroguanosine-3'-phosphate
  modified_base 9: mod_base = OTHER; note = 2'-O-methylcytidine-3'-phosphate
  modified_base 10: mod_base = OTHER; note = 2'-deoxy-2'-fluoroadenosine-3'-phosphate
  modified_base 11: mod_base = OTHER; note = 2'-O-methyladenosine-3'-phosphate
  modified_base 12: mod_base = OTHER; note = 2'-O-methylguanosine-3'-phosphate
  modified_base 13: mod_base = OTHER; note = 2'-O-methyladenosine-3'-phosphate
  modified_base 14: mod_base = OTHER; note = 2'-deoxy-2'-fluoroadenosine-3'-phosphate
  modified_base 15: mod_base = OTHER; note = 2'-O-methylcytidine-3'-phosphate
  modified_base 16: mod_base = OTHER; note = 2'-deoxy-2'-fluoroadenosine-3'-phosphate
  modified_base 17: mod_base = OTHER; note = 2'-O-methylcytidine-3'-phosphate
  modified_base 18: mod_base = OTHER; note = 2'-deoxy-2'-fluorouridine-3'-phosphate
  modified_base 19: mod_base = OTHER; note = 2'-O-methylguanosine-3'-phosphate
  modified_base 20: mod_base = OTHER; note = 2'-deoxy-2'-fluorouridine-3'-phosphate
  modified_base 21: mod_base = OTHER; note = 2'-O-methyluridine-3'-phosphorothioate
  modified_base 22: mod_base = OTHER; note = 2'-O-methyluridine-3'-phosphorothioate
  modified_base 23: mod_base = OTHER; note = 2'-O-methyluridine
ttatagagcaagaacactgtttt

SEQ ID NO: 562 - RNA, 23 nt, synthetic construct
  source 1..23: mol_type = other RNA
  modified_base 1: mod_base = OTHER; note = 2'-O-methyluridine-3'-phosphorothioate
  modified_base 2: mod_base = OTHER; note = 2'-deoxy-2'-fluorouridine-3'-phosphorothioate
  modified_base 3: mod_base = OTHER; note = 2'-O-methyladenosine-3'-phosphate
  modified_base 4: mod_base = OTHER; note = 2'-deoxy-2'-fluorouridine-3'-phosphate
  modified_base 5: mod_base = OTHER; note = 2'-O-methyladenosine-3'-phosphate
  modified_base 6: mod_base = OTHER; note = 2'-deoxy-2'-fluoroguanosine-3'-phosphate
  modified_base 7: mod_base = OTHER; note = 2'-O-methyladenosine-3'-phosphate
  modified_base 8: mod_base = OTHER; note = 2'-deoxy-2'-fluoroguanosine-3'-phosphate
  modified_base 9: mod_base = OTHER; note = 2'-O-methylcytidine-3'-phosphate
  modified_base 10: mod_base = OTHER; note = 2'-deoxy-2'-fluoroadenosine-3'-phosphate
  modified_base 11: mod_base = OTHER; note = 2'-O-methyladenosine-3'-phosphate
  modified_base 12: mod_base = OTHER; note = 2'-O-methylguanosine-3'-phosphate
  modified_base 13: mod_base = OTHER; note = 2'-O-methyladenosine-3'-phosphate
  modified_base 14: mod_base = OTHER; note = 2'-deoxy-2'-fluoroadenosine-3'-phosphate
  modified_base 15: mod_base = OTHER; note = 2'-O-methylcytidine-3'-phosphate
  modified_base 16: mod_base = OTHER; note = 2'-deoxy-2'-fluoroadenosine-3'-phosphate
  modified_base 17: mod_base = OTHER; note = 2'-O-methylcytidine-3'-phosphate
  modified_base 18: mod_base = OTHER; note = 2'-deoxy-2'-fluorouridine-3'-phosphate
  modified_base 19: mod_base = OTHER; note = 2'-O-methylguanosine-3'-phosphate
  modified_base 20: mod_base = OTHER; note = 2'-deoxy-2'-fluorouridine-3'-phosphate
  modified_base 21: mod_base = OTHER; note = 2'-O-methyluridine-3'-phosphorothioate
  modified_base 22: mod_base = OTHER; note = 2'-O-methyluridine-3'-phosphorothioate
  modified_base 23: mod_base = OTHER; note = 2'-O-methyluridine
ttatagagcaagaacactgtttt

SEQ ID NO: 563 - RNA, 23 nt, synthetic construct
  source 1..23: mol_type = other RNA
  modified_base 1: mod_base = OTHER; note = 2'-O-methyluridine-3'-phosphorothioate
  modified_base 2: mod_base = OTHER; note = 2'-deoxy-2'-fluorouridine-3'-phosphorothioate
  modified_base 3: mod_base = OTHER; note = 2'-O-methyladenosine-3'-phosphate
  modified_base 4: mod_base = OTHER; note = 2'-deoxy-2'-fluorouridine-3'-phosphate
  modified_base 5: mod_base = OTHER; note = 2'-O-methyladenosine-3'-phosphate
  modified_base 6: mod_base = OTHER; note = 2'-deoxy-2'-fluoroguanosine-3'-phosphate
  modified_base 7: mod_base = OTHER; note = 2'-O-methyladenosine-3'-phosphate
  modified_base 8: mod_base = OTHER; note = 2'-deoxy-2'-fluoroguanosine-3'-phosphate
  modified_base 9: mod_base = OTHER; note = 2'-O-methylcytidine-3'-phosphate
  modified_base 10: mod_base = OTHER; note = 2'-deoxy-2'-fluoroadenosine-3'-phosphate
  modified_base 11: mod_base = OTHER; note = 2'-O-methyladenosine-3'-phosphate
  modified_base 12: mod_base = OTHER; note = 2'-O-methylguanosine-3'-phosphate
  modified_base 13: mod_base = OTHER; note = 2'-O-methyladenosine-3'-phosphate
  modified_base 14: mod_base = OTHER; note = 2'-deoxy-2'-fluoroadenosine-3'-phosphate
  modified_base 15: mod_base = OTHER; note = 2'-O-methylcytidine-3'-phosphate
  modified_base 16: mod_base = OTHER; note = 2'-deoxy-2'-fluoroadenosine-3'-phosphate
  modified_base 17: mod_base = OTHER; note = 2'-O-methylcytidine-3'-phosphate
  modified_base 18: mod_base = OTHER; note = 2'-deoxy-2'-fluorouridine-3'-phosphate
  modified_base 19: mod_base = OTHER; note = 2'-O-methylguanosine-3'-phosphate
  modified_base 20: mod_base = OTHER; note = 2'-deoxy-2'-fluorouridine-3'-phosphate
  modified_base 21: mod_base = OTHER; note = 2'-O-methyluridine-3'-phosphorothioate
  modified_base 22: mod_base = OTHER; note = 2'-O-methyluridine-3'-phosphorothioate
  modified_base 23: mod_base = OTHER; note = 2'-O-methyluridine
ttatagagcaagaacactgtttt

SEQ ID NO: 564 - RNA, 23 nt, synthetic construct
  source 1..23: mol_type = other RNA
  modified_base 1: mod_base = OTHER; note = 2'-O-methyluridine-3'-phosphorothioate
  modified_base 2: mod_base = OTHER; note = 2'-deoxy-2'-fluorouridine-3'-phosphorothioate
  modified_base 3: mod_base = OTHER; note = 2'-O-methyladenosine-3'-phosphate
  modified_base 4: mod_base = OTHER; note = 2'-deoxy-2'-fluorouridine-3'-phosphate
  modified_base 5: mod_base = OTHER; note = 2'-O-methyladenosine-3'-phosphate
  modified_base 6: mod_base = OTHER; note = 2'-deoxy-2'-fluoroguanosine-3'-phosphate
  modified_base 7: mod_base = OTHER; note = 2'-O-methyladenosine-3'-phosphate
  modified_base 8: mod_base = OTHER; note = 2'-deoxy-2'-fluoroguanosine-3'-phosphate
  modified_base 9: mod_base = OTHER; note = 2'-O-methylcytidine-3'-phosphate
  modified_base 10: mod_base = OTHER; note = 2'-deoxy-2'-fluoroadenosine-3'-phosphate
  modified_base 11: mod_base = OTHER; note = 2'-O-methyladenosine-3'-phosphate
  modified_base 12: mod_base = OTHER; note = 2'-O-methylguanosine-3'-phosphate
  modified_base 13: mod_base = OTHER; note = 2'-O-methyladenosine-3'-phosphate
  modified_base 14: mod_base = OTHER; note = 2'-deoxy-2'-fluoroadenosine-3'-phosphate
  modified_base 15: mod_base = OTHER; note = 2'-O-methylcytidine-3'-phosphate
  modified_base 16: mod_base = OTHER; note = 2'-deoxy-2'-fluoroadenosine-3'-phosphate
  modified_base 17: mod_base = OTHER; note = 2'-O-methylcytidine-3'-phosphate
  modified_base 18: mod_base = OTHER; note = 2'-deoxy-2'-fluorouridine-3'-phosphate
  modified_base 19: mod_base = OTHER; note = 2'-O-methylguanosine-3'-phosphate
  modified_base 20: mod_base = OTHER; note = 2'-deoxy-2'-fluorouridine-3'-phosphate
  modified_base 21: mod_base = OTHER; note = 2'-O-methyluridine-3'-phosphorothioate
  modified_base 22: mod_base = OTHER; note = 2'-O-methyluridine-3'-phosphorothioate
  modified_base 23: mod_base = OTHER; note = 2'-O-methyluridine
ttatagagcaagaacactgtttt

SEQ ID NO: 565 - RNA, 23 nt, synthetic construct
  source 1..23: mol_type = other RNA
  modified_base 1: mod_base = OTHER; note = 2'-O-methyluridine-3'-phosphorothioate
  modified_base 2: mod_base = OTHER; note = 2'-deoxy-2'-fluorouridine-3'-phosphorothioate
  modified_base 3: mod_base = OTHER; note = 2'-O-methyladenosine-3'-phosphate
  modified_base 4: mod_base = OTHER; note = 2'-deoxy-2'-fluorouridine-3'-phosphate
  modified_base 5: mod_base = OTHER; note = 2'-O-methyladenosine-3'-phosphate
  modified_base 6: mod_base = OTHER; note = 2'-deoxy-2'-fluoroguanosine-3'-phosphate
  modified_base 7: mod_base = OTHER; note = 2'-O-methyladenosine-3'-phosphate
  modified_base 8: mod_base = OTHER; note = 2'-deoxy-2'-fluoroguanosine-3'-phosphate
  modified_base 9: mod_base = OTHER; note = 2'-O-methylcytidine-3'-phosphate
  modified_base 10: mod_base = OTHER; note = 2'-deoxy-2'-fluoroadenosine-3'-phosphate
  modified_base 11: mod_base = OTHER; note = 2'-O-methyladenosine-3'-phosphate
  modified_base 12: mod_base = OTHER; note = 2'-O-methylguanosine-3'-phosphate
  modified_base 13: mod_base = OTHER; note = 2'-O-methyladenosine-3'-phosphate
  modified_base 14: mod_base = OTHER; note = 2'-deoxy-2'-fluoroadenosine-3'-phosphate
  modified_base 15: mod_base = OTHER; note = 2'-O-methylcytidine-3'-phosphate
  modified_base 16: mod_base = OTHER; note = 2'-deoxy-2'-fluoroadenosine-3'-phosphate
  modified_base 17: mod_base = OTHER; note = 2'-O-methylcytidine-3'-phosphate
  modified_base 18: mod_base = OTHER; note = 2'-deoxy-2'-fluorouridine-3'-phosphate
  modified_base 19: mod_base = OTHER; note = 2'-O-methylguanosine-3'-phosphate
  modified_base 20: mod_base = OTHER; note = 2'-deoxy-2'-fluorouridine-3'-phosphate
  modified_base 21: mod_base = OTHER; note = 2'-O-methyluridine-3'-phosphorothioate
  modified_base 22: mod_base = OTHER; note = 2'-O-methyluridine-3'-phosphorothioate
  modified_base 23: mod_base = OTHER; note = 2'-O-methyluridine
ttatagagcaagaacactgtttt

SEQ ID NO: 566 - RNA, 23 nt, synthetic construct
  source 1..23: mol_type = other RNA
  modified_base 1: mod_base = OTHER; note = 2'-O-methyluridine-3'-phosphorothioate
  modified_base 2: mod_base = OTHER; note = 2'-deoxy-2'-fluorouridine-3'-phosphorothioate
  modified_base 3: mod_base = OTHER; note = 2'-O-methyladenosine-3'-phosphate
  modified_base 4: mod_base = OTHER; note = 2'-deoxy-2'-fluorouridine-3'-phosphate
  modified_base 5: mod_base = OTHER; note = 2'-O-methyladenosine-3'-phosphate
  modified_base 6: mod_base = OTHER; note = 2'-deoxy-2'-fluoroguanosine-3'-phosphate
  modified_base 7: mod_base = OTHER; note = 2'-O-methyladenosine-3'-phosphate
  modified_base 8: mod_base = OTHER; note = 2'-deoxy-2'-fluoroguanosine-3'-phosphate
  modified_base 9: mod_base = OTHER; note = 2'-O-methylcytidine-3'-phosphate
  modified_base 10: mod_base = OTHER; note = 2'-deoxy-2'-fluoroadenosine-3'-phosphate
  modified_base 11: mod_base = OTHER; note = 2'-O-methyladenosine-3'-phosphate
  modified_base 12: mod_base = OTHER; note = 2'-O-methylguanosine-3'-phosphate
  modified_base 13: mod_base = OTHER; note = 2'-O-methyladenosine-3'-phosphate
  modified_base 14: mod_base = OTHER; note = 2'-deoxy-2'-fluoroadenosine-3'-phosphate
  modified_base 15: mod_base = OTHER; note = 2'-O-methylcytidine-3'-phosphate
  modified_base 16: mod_base = OTHER; note = 2'-deoxy-2'-fluoroadenosine-3'-phosphate
  modified_base 17: mod_base = OTHER; note = 2'-O-methylcytidine-3'-phosphate
  modified_base 18: mod_base = OTHER; note = 2'-deoxy-2'-fluorouridine-3'-phosphate
  modified_base 19: mod_base = OTHER; note = 2'-O-methylguanosine-3'-phosphate
  modified_base 20: mod_base = OTHER; note = 2'-deoxy-2'-fluorouridine-3'-phosphate
  modified_base 21: mod_base = OTHER; note = 2'-O-methyluridine-3'-phosphorothioate
  modified_base 22: mod_base = OTHER; note = 2'-O-methyluridine-3'-phosphorothioate
  modified_base 23: mod_base = OTHER; note = 2'-O-methyluridine
ttatagagcaagaacactgtttt

SEQ ID NO: 567 - RNA, 23 nt, synthetic construct
  source 1..23: mol_type = other RNA
  modified_base 1: mod_base = OTHER; note = 2'-O-methyluridine-3'-phosphorothioate
  modified_base 2: mod_base = OTHER; note = 2'-deoxy-2'-fluorouridine-3'-phosphorothioate
  modified_base 3: mod_base = OTHER; note = 2'-O-methyladenosine-3'-phosphate
  modified_base 4: mod_base = OTHER; note = 2'-deoxy-2'-fluorouridine-3'-phosphate
  modified_base 5: mod_base = OTHER; note = 2'-O-methyladenosine-3'-phosphate
  modified_base 6: mod_base = OTHER; note = 2'-deoxy-2'-fluoroguanosine-3'-phosphate
  modified_base 7: mod_base = OTHER; note = 2'-O-methyladenosine-3'-phosphate
  modified_base 8: mod_base = OTHER; note = 2'-deoxy-2'-fluoroguanosine-3'-phosphate
  modified_base 9: mod_base = OTHER; note = 2'-O-methylcytidine-3'-phosphate
  modified_base 10: mod_base = OTHER; note = 2'-deoxy-2'-fluoroadenosine-3'-phosphate
  modified_base 11: mod_base = OTHER; note = 2'-O-methyladenosine-3'-phosphate
  modified_base 12: mod_base = OTHER; note = 2'-O-methylguanosine-3'-phosphate
  modified_base 13: mod_base = OTHER; note = 2'-O-methyladenosine-3'-phosphate
  modified_base 14: mod_base = OTHER; note = 2'-deoxy-2'-fluoroadenosine-3'-phosphate
  modified_base 15: mod_base = OTHER; note = 2'-O-methylcytidine-3'-phosphate
  modified_base 16: mod_base = OTHER; note = 2'-deoxy-2'-fluoroadenosine-3'-phosphate
  modified_base 17: mod_base = OTHER; note = 2'-O-methylcytidine-3'-phosphate
  modified_base 18: mod_base = OTHER; note = 2'-deoxy-2'-fluorouridine-3'-phosphate
  modified_base 19: mod_base = OTHER; note = 2'-O-methylguanosine-3'-phosphate
  modified_base 20: mod_base = OTHER; note = 2'-deoxy-2'-fluorouridine-3'-phosphate
  modified_base 21: mod_base = OTHER; note = 2'-O-methyluridine-3'-phosphorothioate
  modified_base 22: mod_base = OTHER; note = 2'-O-methyluridine-3'-phosphorothioate
  modified_base 23: mod_base = OTHER; note = 2'-O-methyluridine
ttatagagcaagaacactgtttt

SEQ ID NO: 568 - RNA, 23 nt, synthetic construct
  source 1..23: mol_type = other RNA
  modified_base 1: mod_base = OTHER; note = 2'-O-methyluridine-3'-phosphorothioate
  modified_base 2: mod_base = OTHER; note = 2'-deoxy-2'-fluorouridine-3'-phosphorothioate
  modified_base 3: mod_base = OTHER; note = 2'-O-methyladenosine-3'-phosphate
  modified_base 4: mod_base = OTHER; note = 2'-deoxy-2'-fluorouridine-3'-phosphate
  modified_base 5: mod_base = OTHER; note = 2'-O-methyladenosine-3'-phosphate
  modified_base 6: mod_base = OTHER; note = 2'-deoxy-2'-fluoroguanosine-3'-phosphate
  modified_base 7: mod_base = OTHER; note = 2'-O-methyladenosine-3'-phosphate
  modified_base 8: mod_base = OTHER; note = 2'-deoxy-2'-fluoroguanosine-3'-phosphate
  modified_base 9: mod_base = OTHER; note = 2'-O-methylcytidine-3'-phosphate
  modified_base 10: mod_base = OTHER; note = 2'-deoxy-2'-fluoroadenosine-3'-phosphate
  modified_base 11: mod_base = OTHER; note = 2'-O-methyladenosine-3'-phosphate
  modified_base 12: mod_base = OTHER; note = 2'-O-methylguanosine-3'-phosphate
  modified_base 13: mod_base = OTHER; note = 2'-O-methyladenosine-3'-phosphate
  modified_base 14: mod_base = OTHER; note = 2'-deoxy-2'-fluoroadenosine-3'-phosphate
  modified_base 15: mod_base = OTHER; note = 2'-O-methylcytidine-3'-phosphate
  modified_base 16: mod_base = OTHER; note = 2'-deoxy-2'-fluoroadenosine-3'-phosphate
  modified_base 17: mod_base = OTHER; note = 2'-O-methylcytidine-3'-phosphate
  modified_base 18: mod_base = OTHER; note = 2'-deoxy-2'-fluorouridine-3'-phosphate
  modified_base 19: mod_base = OTHER; note = 2'-O-methylguanosine-3'-phosphate
  modified_base 20: mod_base = OTHER; note = 2'-deoxy-2'-fluorouridine-3'-phosphate
  modified_base 21: mod_base = OTHER; note = 2'-O-methyluridine-3'-phosphorothioate
  modified_base 22: mod_base = OTHER; note = 2'-O-methyluridine-3'-phosphorothioate
  modified_base 23: mod_base = OTHER; note = 2'-O-methyluridine
ttatagagcaagaacactgtttt

SEQ ID NO: 569 - RNA, 23 nt, synthetic construct
  source 1..23: mol_type = other RNA
  modified_base 1: mod_base = OTHER; note = 2'-O-methyluridine-3'-phosphorothioate
  modified_base 2: mod_base = OTHER; note = 2'-deoxy-2'-fluorouridine-3'-phosphorothioate
  modified_base 3: mod_base = OTHER; note = 2'-O-methyladenosine-3'-phosphate
  modified_base 4: mod_base = OTHER; note = 2'-deoxy-2'-fluorouridine-3'-phosphate
  modified_base 5: mod_base = OTHER; note = 2'-O-methyladenosine-3'-phosphate
  modified_base 6: mod_base = OTHER; note = 2'-deoxy-2'-fluoroguanosine-3'-phosphate
  modified_base 7: mod_base = OTHER; note = 2'-O-methyladenosine-3'-phosphate
  modified_base 8: mod_base = OTHER; note = 2'-deoxy-2'-fluoroguanosine-3'-phosphate
  modified_base 9: mod_base = OTHER; note = 2'-O-methylcytidine-3'-phosphate
  modified_base 10: mod_base = OTHER; note = 2'-deoxy-2'-fluoroadenosine-3'-phosphate
  modified_base 11: mod_base = OTHER; note = 2'-O-methyladenosine-3'-phosphate
  modified_base 12: mod_base = OTHER; note = 2'-O-methylguanosine-3'-phosphate
  modified_base 13: mod_base = OTHER; note = 2'-O-methyladenosine-3'-phosphate
  modified_base 14: mod_base = OTHER; note = 2'-deoxy-2'-fluoroadenosine-3'-phosphate
  modified_base 15: mod_base = OTHER; note = 2'-O-methylcytidine-3'-phosphate
  modified_base 16: mod_base = OTHER; note = 2'-deoxy-2'-fluoroadenosine-3'-phosphate
  modified_base 17: mod_base = OTHER; note = 2'-O-methylcytidine-3'-phosphate
  modified_base 18: mod_base = OTHER; note = 2'-deoxy-2'-fluorouridine-3'-phosphate
  modified_base 19: mod_base = OTHER; note = 2'-O-methylguanosine-3'-phosphate
  modified_base 20: mod_base = OTHER; note = 2'-deoxy-2'-fluorouridine-3'-phosphate
  modified_base 21: mod_base = OTHER; note = 2'-O-methyluridine-3'-phosphorothioate
  modified_base 22: mod_base = OTHER; note = 2'-O-methyluridine-3'-phosphorothioate
  modified_base 23: mod_base = OTHER; note = 2'-O-methyluridine
ttatagagcaagaacactgtttt

SEQ ID NO: 570 - RNA, 23 nt, synthetic construct
  source 1..23: mol_type = other RNA
  modified_base 1: mod_base = OTHER; note = 1-deoxy-1-(thymin-1-yl)-alpha-L-threofuranose 2-phosphorothioate
  modified_base 2: mod_base = OTHER; note = 2'-deoxy-2'-fluorouridine-3'-phosphorothioate
  modified_base 3: mod_base = OTHER; note = 2'-O-methyladenosine-3'-phosphate
  modified_base 4: mod_base = OTHER; note = 2'-deoxy-2'-fluorouridine-3'-phosphate
  modified_base 5: mod_base = OTHER; note = 2'-O-methyladenosine-3'-phosphate
  modified_base 6: mod_base = OTHER; note = 2'-deoxy-2'-fluoroguanosine-3'-phosphate
  modified_base 7: mod_base = OTHER; note = 2'-O-methyladenosine-3'-phosphate
  modified_base 8: mod_base = OTHER; note = 2'-deoxy-2'-fluoroguanosine-3'-phosphate
  modified_base 9: mod_base = OTHER; note = 2'-O-methylcytidine-3'-phosphate
  modified_base 10: mod_base = OTHER; note = 2'-deoxy-2'-fluoroadenosine-3'-phosphate
  modified_base 11: mod_base = OTHER; note = 2'-O-methyladenosine-3'-phosphate
  modified_base 12: mod_base = OTHER; note = 2'-O-methylguanosine-3'-phosphate
  modified_base 13: mod_base = OTHER; note = 2'-O-methyladenosine-3'-phosphate
  modified_base 14: mod_base = OTHER; note = 2'-deoxy-2'-fluoroadenosine-3'-phosphate
  modified_base 15: mod_base = OTHER; note = 2'-O-methylcytidine-3'-phosphate
  modified_base 16: mod_base = OTHER; note = 2'-deoxy-2'-fluoroadenosine-3'-phosphate
  modified_base 17: mod_base = OTHER; note = 2'-O-methylcytidine-3'-phosphate
  modified_base 18: mod_base = OTHER; note = 2'-deoxy-2'-fluorouridine-3'-phosphate
  modified_base 19: mod_base = OTHER; note = 2'-O-methylguanosine-3'-phosphate
  modified_base 20: mod_base = OTHER; note = 2'-deoxy-2'-fluorouridine-3'-phosphate
  modified_base 21: mod_base = OTHER; note = 2'-O-methyluridine-3'-phosphorothioate
  modified_base 22: mod_base = OTHER; note = 2'-O-methyluridine-3'-phosphorothioate
  modified_base 23: mod_base = OTHER; note = 2'-O-methyluridine
ttatagagcaagaacactgtttt

SEQ ID NO: 571 - RNA, 23 nt, synthetic construct
  source 1..23: mol_type = other RNA
  modified_base 1: mod_base = OTHER; note = 2'-O-methyluridine-3'-phosphorothioate
  modified_base 2: mod_base = OTHER; note = 1-deoxy-1-(thymin-1-yl)-alpha-L-threofuranose 2-phosphorothioate
  modified_base 3: mod_base = OTHER; note = 2'-O-methyladenosine-3'-phosphate
  modified_base 4: mod_base = OTHER; note = 2'-deoxy-2'-fluorouridine-3'-phosphate
  modified_base 5: mod_base = OTHER; note = 2'-O-methyladenosine-3'-phosphate
  modified_base 6: mod_base = OTHER; note = 2'-deoxy-2'-fluoroguanosine-3'-phosphate
  modified_base 7: mod_base = OTHER; note = 2'-O-methyladenosine-3'-phosphate
  modified_base 8: mod_base = OTHER; note = 2'-deoxy-2'-fluoroguanosine-3'-phosphate
  modified_base 9: mod_base = OTHER; note = 2'-O-methylcytidine-3'-phosphate
  modified_base 10: mod_base = OTHER; note = 2'-deoxy-2'-fluoroadenosine-3'-phosphate
  modified_base 11: mod_base = OTHER; note = 2'-O-methyladenosine-3'-phosphate
  modified_base 12: mod_base = OTHER; note = 2'-O-methylguanosine-3'-phosphate
  modified_base 13: mod_base = OTHER; note = 2'-O-methyladenosine-3'-phosphate
  modified_base 14: mod_base = OTHER; note = 2'-deoxy-2'-fluoroadenosine-3'-phosphate
  modified_base 15: mod_base = OTHER; note = 2'-O-methylcytidine-3'-phosphate
  modified_base 16: mod_base = OTHER; note = 2'-deoxy-2'-fluoroadenosine-3'-phosphate
  modified_base 17: mod_base = OTHER; note = 2'-O-methylcytidine-3'-phosphate
  modified_base 18: mod_base = OTHER; note = 2'-deoxy-2'-fluorouridine-3'-phosphate
  modified_base 19: mod_base = OTHER; note = 2'-O-methylguanosine-3'-phosphate
  modified_base 20: mod_base = OTHER; note = 2'-deoxy-2'-fluorouridine-3'-phosphate
  modified_base 21: mod_base = OTHER; note = 2'-O-methyluridine-3'-phosphorothioate
  modified_base 22: mod_base = OTHER; note = 2'-O-methyluridine-3'-phosphorothioate
  modified_base 23: mod_base = OTHER; note = 2'-O-methyluridine
ttatagagcaagaacactgtttt

SEQ ID NO: 572 - RNA, 23 nt, synthetic construct
  source 1..23: mol_type = other RNA
  modified_base 1: mod_base = OTHER; note = 2'-O-methyluridine-3'-phosphorothioate
  modified_base 2: mod_base = OTHER; note = 2'-deoxy-2'-fluorouridine-3'-phosphorothioate
  modified_base 3: mod_base = OTHER; note = 1-deoxy-1-(adenin-9-yl)-alpha-L-threofuranose 2-phosphate
  modified_base 4: mod_base = OTHER; note = 2'-deoxy-2'-fluorouridine-3'-phosphate
  modified_base 5: mod_base = OTHER; note = 2'-O-methyladenosine-3'-phosphate
  modified_base 6: mod_base = OTHER; note = 2'-deoxy-2'-fluoroguanosine-3'-phosphate
  modified_base 7: mod_base = OTHER; note = 2'-O-methyladenosine-3'-phosphate
  modified_base 8: mod_base = OTHER; note = 2'-deoxy-2'-fluoroguanosine-3'-phosphate
  modified_base 9: mod_base = OTHER; note = 2'-O-methylcytidine-3'-phosphate
  modified_base 10: mod_base = OTHER; note = 2'-deoxy-2'-fluoroadenosine-3'-phosphate
  modified_base 11: mod_base = OTHER; note = 2'-O-methyladenosine-3'-phosphate
  modified_base 12: mod_base = OTHER; note = 2'-O-methylguanosine-3'-phosphate
  modified_base 13: mod_base = OTHER; note = 2'-O-methyladenosine-3'-phosphate
  modified_base 14: mod_base = OTHER; note = 2'-deoxy-2'-fluoroadenosine-3'-phosphate
  modified_base 15: mod_base = OTHER; note = 2'-O-methylcytidine-3'-phosphate
  modified_base 16: mod_base = OTHER; note = 2'-deoxy-2'-fluoroadenosine-3'-phosphate
  modified_base 17: mod_base = OTHER; note = 2'-O-methylcytidine-3'-phosphate
  modified_base 18: mod_base = OTHER; note = 2'-deoxy-2'-fluorouridine-3'-phosphate
  modified_base 19: mod_base = OTHER; note = 2'-O-methylguanosine-3'-phosphate
  modified_base 20: mod_base = OTHER; note = 2'-deoxy-2'-fluorouridine-3'-phosphate
  modified_base 21: mod_base = OTHER; note = 2'-O-methyluridine-3'-phosphorothioate
  modified_base 22: mod_base = OTHER; note = 2'-O-methyluridine-3'-phosphorothioate
  modified_base 23: mod_base = OTHER; note = 2'-O-methyluridine
ttatagagcaagaacactgtttt

SEQ ID NO: 573 - RNA, 23 nt, synthetic construct
  source 1..23: mol_type = other RNA
  modified_base 1: mod_base = OTHER; note = 2'-O-methyluridine-3'-phosphorothioate
  modified_base 2: mod_base = OTHER; note = 2'-deoxy-2'-fluorouridine-3'-phosphorothioate
  modified_base 3: mod_base = OTHER; note = 2'-O-methyladenosine-3'-phosphate
  modified_base 4: mod_base = OTHER; note = 1-deoxy-1-(thymin-1-yl)-alpha-L-threofuranose 2-phosphate
  modified_base 5: mod_base = OTHER; note = 2'-O-methyladenosine-3'-phosphate
  modified_base 6: mod_base = OTHER; note = 2'-deoxy-2'-fluoroguanosine-3'-phosphate
  modified_base 7: mod_base = OTHER; note = 2'-O-methyladenosine-3'-phosphate
  modified_base 8: mod_base = OTHER; note = 2'-deoxy-2'-fluoroguanosine-3'-phosphate
  modified_base 9: mod_base = OTHER; note = 2'-O-methylcytidine-3'-phosphate
  modified_base 10: mod_base = OTHER; note = 2'-deoxy-2'-fluoroadenosine-3'-phosphate
  modified_base 11: mod_base = OTHER; note = 2'-O-methyladenosine-3'-phosphate
  modified_base 12: mod_base = OTHER; note = 2'-O-methylguanosine-3'-phosphate
  modified_base 13: mod_base = OTHER; note = 2'-O-methyladenosine-3'-phosphate
  modified_base 14: mod_base = OTHER; note = 2'-deoxy-2'-fluoroadenosine-3'-phosphate
  modified_base 15: mod_base = OTHER; note = 2'-O-methylcytidine-3'-phosphate
  modified_base 16: mod_base = OTHER; note = 2'-deoxy-2'-fluoroadenosine-3'-phosphate
  modified_base 17: mod_base = OTHER; note = 2'-O-methylcytidine-3'-phosphate
  modified_base 18: mod_base = OTHER; note = 2'-deoxy-2'-fluorouridine-3'-phosphate
  modified_base 19: mod_base = OTHER; note = 2'-O-methylguanosine-3'-phosphate
  modified_base 20: mod_base = OTHER; note = 2'-deoxy-2'-fluorouridine-3'-phosphate
  modified_base 21: mod_base = OTHER; note = 2'-O-methyluridine-3'-phosphorothioate
  modified_base 22: mod_base = OTHER; note = 2'-O-methyluridine-3'-phosphorothioate
  modified_base 23: mod_base = OTHER; note = 2'-O-methyluridine
ttatagagcaagaacactgtttt

SEQ ID NO: 574 - RNA, 23 nt, synthetic construct
  source 1..23: mol_type = other RNA
  modified_base 1: mod_base = OTHER; note = 2'-O-methyluridine-3'-phosphorothioate
  modified_base 2: mod_base = OTHER; note = 2'-deoxy-2'-fluorouridine-3'-phosphorothioate
  modified_base 3: mod_base = OTHER; note = 2'-O-methyladenosine-3'-phosphate
  modified_base 4: mod_base = OTHER; note = 2'-deoxy-2'-fluorouridine-3'-phosphate
  modified_base 5: mod_base = OTHER; note = 1-deoxy-1-(adenin-9-yl)-alpha-L-threofuranose 2-phosphate
  modified_base 6: mod_base = OTHER; note = 2'-deoxy-2'-fluoroguanosine-3'-phosphate
  modified_base 7: mod_base = OTHER; note = 2'-O-methyladenosine-3'-phosphate
  modified_base 8: mod_base = OTHER; note = 2'-deoxy-2'-fluoroguanosine-3'-phosphate
  modified_base 9: mod_base = OTHER; note = 2'-O-methylcytidine-3'-phosphate
  modified_base 10: mod_base = OTHER; note = 2'-deoxy-2'-fluoroadenosine-3'-phosphate
  modified_base 11: mod_base = OTHER; note = 2'-O-methyladenosine-3'-phosphate
  modified_base 12: mod_base = OTHER; note = 2'-O-methylguanosine-3'-phosphate
  modified_base 13: mod_base = OTHER; note = 2'-O-methyladenosine-3'-phosphate
  modified_base 14: mod_base = OTHER; note = 2'-deoxy-2'-fluoroadenosine-3'-phosphate
  modified_base 15: mod_base = OTHER; note = 2'-O-methylcytidine-3'-phosphate
  modified_base 16: mod_base = OTHER; note = 2'-deoxy-2'-fluoroadenosine-3'-phosphate
  modified_base 17: mod_base = OTHER; note = 2'-O-methylcytidine-3'-phosphate
  modified_base 18: mod_base = OTHER; note = 2'-deoxy-2'-fluorouridine-3'-phosphate
  modified_base 19: mod_base = OTHER; note = 2'-O-methylguanosine-3'-phosphate
  modified_base 20: mod_base = OTHER; note = 2'-deoxy-2'-fluorouridine-3'-phosphate
  modified_base 21: mod_base = OTHER; note = 2'-O-methyluridine-3'-phosphorothioate
  modified_base 22: mod_base = OTHER; note = 2'-O-methyluridine-3'-phosphorothioate
  modified_base 23: mod_base = OTHER; note = 2'-O-methyluridine
ttatagagcaagaacactgtttt

SEQ ID NO: 575 - RNA, 23 nt, synthetic construct
  source 1..23: mol_type = other RNA
  modified_base 1: mod_base = OTHER; note = 2'-O-methyluridine-3'-phosphorothioate
  modified_base 2: mod_base = OTHER; note = 2'-deoxy-2'-fluorouridine-3'-phosphorothioate
  modified_base 3: mod_base = OTHER; note = 2'-O-methyladenosine-3'-phosphate
  modified_base 4: mod_base = OTHER; note = 2'-deoxy-2'-fluorouridine-3'-phosphate
  modified_base 5: mod_base = OTHER; note = 2'-O-methyladenosine-3'-phosphate
  modified_base 6: mod_base = OTHER; note = 1-deoxy-1-(guanin-9-yl)-alpha-L-threofuranose 2-phosphate
  modified_base 7: mod_base = OTHER; note = 2'-O-methyladenosine-3'-phosphate
  modified_base 8: mod_base = OTHER; note = 2'-deoxy-2'-fluoroguanosine-3'-phosphate
  modified_base 9: mod_base = OTHER; note = 2'-O-methylcytidine-3'-phosphate
  modified_base 10: mod_base = OTHER; note = 2'-deoxy-2'-fluoroadenosine-3'-phosphate
  modified_base 11: mod_base = OTHER; note = 2'-O-methyladenosine-3'-phosphate
  modified_base 12: mod_base = OTHER; note = 2'-O-methylguanosine-3'-phosphate
  modified_base 13: mod_base = OTHER; note = 2'-O-methyladenosine-3'-phosphate
  modified_base 14: mod_base = OTHER; note = 2'-deoxy-2'-fluoroadenosine-3'-phosphate
  modified_base 15: mod_base = OTHER; note = 2'-O-methylcytidine-3'-phosphate
  modified_base 16: mod_base = OTHER; note = 2'-deoxy-2'-fluoroadenosine-3'-phosphate
  modified_base 17: mod_base = OTHER; note = 2'-O-methylcytidine-3'-phosphate
  modified_base 18: mod_base = OTHER; note = 2'-deoxy-2'-fluorouridine-3'-phosphate
  modified_base 19: mod_base = OTHER; note = 2'-O-methylguanosine-3'-phosphate
  modified_base 20: mod_base = OTHER; note = 2'-deoxy-2'-fluorouridine-3'-phosphate
  modified_base 21: mod_base = OTHER; note = 2'-O-methyluridine-3'-phosphorothioate
  modified_base 22: mod_base = OTHER; note = 2'-O-methyluridine-3'-phosphorothioate
  modified_base 23: mod_base = OTHER; note = 2'-O-methyluridine
ttatagagcaagaacactgtttt

SEQ ID NO: 576 - RNA, 23 nt, synthetic construct
  source 1..23: mol_type = other RNA
  modified_base 1: mod_base = OTHER; note = 2'-O-methyluridine-3'-phosphorothioate
  modified_base 2: mod_base = OTHER; note = 2'-deoxy-2'-fluorouridine-3'-phosphorothioate
  modified_base 3: mod_base = OTHER; note = 2'-O-methyladenosine-3'-phosphate
  modified_base 4: mod_base = OTHER; note = 2'-deoxy-2'-fluorouridine-3'-phosphate
  modified_base 5: mod_base = OTHER; note = 2'-O-methyladenosine-3'-phosphate
  modified_base 6: mod_base = OTHER; note = 2'-deoxy-2'-fluoroguanosine-3'-phosphate
  modified_base 7: mod_base = OTHER; note = 1-deoxy-1-(adenin-9-yl)-alpha-L-threofuranose 2-phosphate
  modified_base 8: mod_base = OTHER; note = 2'-deoxy-2'-fluoroguanosine-3'-phosphate
  modified_base 9: mod_base = OTHER; note = 2'-O-methylcytidine-3'-phosphate
  modified_base 10: mod_base = OTHER; note = 2'-deoxy-2'-fluoroadenosine-3'-phosphate
  modified_base 11: mod_base = OTHER; note = 2'-O-methyladenosine-3'-phosphate
  modified_base 12: mod_base = OTHER; note = 2'-O-methylguanosine-3'-phosphate
  modified_base 13: mod_base = OTHER; note = 2'-O-methyladenosine-3'-phosphate
  modified_base 14: mod_base = OTHER; note = 2'-deoxy-2'-fluoroadenosine-3'-phosphate
  modified_base 15: mod_base = OTHER; note = 2'-O-methylcytidine-3'-phosphate
  modified_base 16: mod_base = OTHER; note = 2'-deoxy-2'-fluoroadenosine-3'-phosphate
  modified_base 17: mod_base = OTHER; note = 2'-O-methylcytidine-3'-phosphate
  modified_base 18: mod_base = OTHER; note = 2'-deoxy-2'-fluorouridine-3'-phosphate
  modified_base 19: mod_base = OTHER; note = 2'-O-methylguanosine-3'-phosphate
  modified_base 20: mod_base = OTHER; note = 2'-deoxy-2'-fluorouridine-3'-phosphate
  modified_base 21: mod_base = OTHER; note = 2'-O-methyluridine-3'-phosphorothioate
  modified_base 22: mod_base = OTHER; note = 2'-O-methyluridine-3'-phosphorothioate
  modified_base 23: mod_base = OTHER; note = 2'-O-methyluridine
ttatagagcaagaacactgtttt

SEQ ID NO: 577 - RNA, 23 nt, synthetic construct
  source 1..23: mol_type = other RNA
  modified_base 1: mod_base = OTHER; note = 2'-O-methyluridine-3'-phosphorothioate
  modified_base 2: mod_base = OTHER; note = 2'-deoxy-2'-fluorouridine-3'-phosphorothioate
  modified_base 3: mod_base = OTHER; note = 2'-O-methyladenosine-3'-phosphate
  modified_base 4: mod_base = OTHER; note = 2'-deoxy-2'-fluorouridine-3'-phosphate
  modified_base 5: mod_base = OTHER; note = 2'-O-methyladenosine-3'-phosphate
  modified_base 6: mod_base = OTHER; note = 2'-deoxy-2'-fluoroguanosine-3'-phosphate
  modified_base 7: mod_base = OTHER; note = 2'-O-methyladenosine-3'-phosphate
  modified_base 8: mod_base = OTHER; note = 1-deoxy-1-(guanin-9-yl)-alpha-L-threofuranose 2-phosphate
  modified_base 9: mod_base = OTHER; note = 2'-O-methylcytidine-3'-phosphate
  modified_base 10: mod_base = OTHER; note = 2'-deoxy-2'-fluoroadenosine-3'-phosphate
  modified_base 11: mod_base = OTHER; note = 2'-O-methyladenosine-3'-phosphate
  modified_base 12: mod_base = OTHER; note = 2'-O-methylguanosine-3'-phosphate
  modified_base 13: mod_base = OTHER; note = 2'-O-methyladenosine-3'-phosphate
  modified_base 14: mod_base = OTHER; note = 2'-deoxy-2'-fluoroadenosine-3'-phosphate
  modified_base 15: mod_base = OTHER; note = 2'-O-methylcytidine-3'-phosphate
  modified_base 16: mod_base = OTHER; note = 2'-deoxy-2'-fluoroadenosine-3'-phosphate
  modified_base 17: mod_base = OTHER; note = 2'-O-methylcytidine-3'-phosphate
  modified_base 18: mod_base = OTHER; note = 2'-deoxy-2'-fluorouridine-3'-phosphate
  modified_base 19: mod_base = OTHER; note = 2'-O-methylguanosine-3'-phosphate
  modified_base 20: mod_base = OTHER; note = 2'-deoxy-2'-fluorouridine-3'-phosphate
  modified_base 21: mod_base = OTHER; note = 2'-O-methyluridine-3'-phosphorothioate
  modified_base 22: mod_base = OTHER; note = 2'-O-methyluridine-3'-phosphorothioate
  modified_base 23: mod_base = OTHER; note = 2'-O-methyluridine
ttatagagcaagaacactgtttt

SEQ ID NO: 578 - RNA, 23 nt, synthetic construct
  source 1..23: mol_type = other RNA
  modified_base 1: mod_base = OTHER; note = 2'-O-methyluridine-3'-phosphorothioate
  modified_base 2: mod_base = OTHER; note = 2'-deoxy-2'-fluorouridine-3'-phosphorothioate
  modified_base 3: mod_base = OTHER; note = 2'-O-methyladenosine-3'-phosphate
  modified_base 4: mod_base = OTHER; note = 2'-deoxy-2'-fluorouridine-3'-phosphate
  modified_base 5: mod_base = OTHER; note = 2'-O-methyladenosine-3'-phosphate
  modified_base 6: mod_base = OTHER; note = 2'-deoxy-2'-fluoroguanosine-3'-phosphate
  modified_base 7: mod_base = OTHER; note = 2'-O-methyladenosine-3'-phosphate
  modified_base 8: mod_base = OTHER; note = 2'-deoxy-2'-fluoroguanosine-3'-phosphate
  modified_base 9: mod_base = OTHER; note 1-deoxy-1-(5-methylcytosin-1-yl)-alpha-L-threofuranose 2-phosphate
  modified_base 10: mod_base = OTHER; note = 2'-deoxy-2'-fluoroadenosine-3'-phosphate
  modified_base 11: mod_base = OTHER; note = 2'-O-methyladenosine-3'-phosphate
  modified_base 12: mod_base = OTHER; note = 2'-O-methylguanosine-3'-phosphate
  modified_base 13: mod_base = OTHER; note = 2'-O-methyladenosine-3'-phosphate
  modified_base 14: mod_base = OTHER; note = 2'-deoxy-2'-fluoroadenosine-3'-phosphate
  modified_base 15: mod_base = OTHER; note = 2'-O-methylcytidine-3'-phosphate
  modified_base 16: mod_base = OTHER; note = 2'-deoxy-2'-fluoroadenosine-3'-phosphate
  modified_base 17: mod_base = OTHER; note = 2'-O-methylcytidine-3'-phosphate
  modified_base 18: mod_base = OTHER; note = 2'-deoxy-2'-fluorouridine-3'-phosphate
  modified_base 19: mod_base = OTHER; note = 2'-O-methylguanosine-3'-phosphate
  modified_base 20: mod_base = OTHER; note = 2'-deoxy-2'-fluorouridine-3'-phosphate
  modified_base 21: mod_base = OTHER; note = 2'-O-methyluridine-3'-phosphorothioate
  modified_base 22: mod_base = OTHER; note = 2'-O-methyluridine-3'-phosphorothioate
  modified_base 23: mod_base = OTHER; note = 2'-O-methyluridine
ttatagagcaagaacactgtttt

SEQ ID NO: 579 - RNA, 23 nt, synthetic construct
  source 1..23: mol_type = other RNA
  modified_base 1: mod_base = OTHER; note = 2'-O-methyluridine-3'-phosphorothioate
  modified_base 2: mod_base = OTHER; note = 2'-deoxy-2'-fluorouridine-3'-phosphorothioate
  modified_base 3: mod_base = OTHER; note = 2'-O-methyladenosine-3'-phosphate
  modified_base 4: mod_base = OTHER; note = 2'-deoxy-2'-fluorouridine-3'-phosphate
  modified_base 5: mod_base = OTHER; note = 2'-O-methyladenosine-3'-phosphate
  modified_base 6: mod_base = OTHER; note = 2'-deoxy-2'-fluoroguanosine-3'-phosphate
  modified_base 7: mod_base = OTHER; note = 2'-O-methyladenosine-3'-phosphate
  modified_base 8: mod_base = OTHER; note = 2'-deoxy-2'-fluoroguanosine-3'-phosphate
  modified_base 9: mod_base = OTHER; note = 2'-O-methylcytidine-3'-phosphate
  modified_base 10: mod_base = OTHER; note = 1-deoxy-1-(adenin-9-yl)-alpha-L-threofuranose 2-phosphate
  modified_base 11: mod_base = OTHER; note = 2'-O-methyladenosine-3'-phosphate
  modified_base 12: mod_base = OTHER; note = 2'-O-methylguanosine-3'-phosphate
  modified_base 13: mod_base = OTHER; note = 2'-O-methyladenosine-3'-phosphate
  modified_base 14: mod_base = OTHER; note = 2'-deoxy-2'-fluoroadenosine-3'-phosphate
  modified_base 15: mod_base = OTHER; note = 2'-O-methylcytidine-3'-phosphate
  modified_base 16: mod_base = OTHER; note = 2'-deoxy-2'-fluoroadenosine-3'-phosphate
  modified_base 17: mod_base = OTHER; note = 2'-O-methylcytidine-3'-phosphate
  modified_base 18: mod_base = OTHER; note = 2'-deoxy-2'-fluorouridine-3'-phosphate
  modified_base 19: mod_base = OTHER; note = 2'-O-methylguanosine-3'-phosphate
  modified_base 20: mod_base = OTHER; note = 2'-deoxy-2'-fluorouridine-3'-phosphate
  modified_base 21: mod_base = OTHER; note = 2'-O-methyluridine-3'-phosphorothioate
  modified_base 22: mod_base = OTHER; note = 2'-O-methyluridine-3'-phosphorothioate
  modified_base 23: mod_base = OTHER; note = 2'-O-methyluridine
ttatagagcaagaacactgtttt

SEQ ID NO: 580 - RNA, 23 nt, synthetic construct
  source 1..23: mol_type = other RNA
  modified_base 1: mod_base = OTHER; note = 2'-O-methyluridine-3'-phosphorothioate
  modified_base 2: mod_base = OTHER; note = 2'-deoxy-2'-fluorouridine-3'-phosphorothioate
  modified_base 3: mod_base = OTHER; note = 2'-O-methyladenosine-3'-phosphate
  modified_base 4: mod_base = OTHER; note = 2'-deoxy-2'-fluorouridine-3'-phosphate
  modified_base 5: mod_base = OTHER; note = 2'-O-methyladenosine-3'-phosphate
  modified_base 6: mod_base = OTHER; note = 2'-deoxy-2'-fluoroguanosine-3'-phosphate
  modified_base 7: mod_base = OTHER; note = 2'-O-methyladenosine-3'-phosphate
  modified_base 8: mod_base = OTHER; note = 2'-deoxy-2'-fluoroguanosine-3'-phosphate
  modified_base 9: mod_base = OTHER; note = 2'-O-methylcytidine-3'-phosphate
  modified_base 10: mod_base = OTHER; note = 2'-deoxy-2'-fluoroadenosine-3'-phosphate
  modified_base 11: mod_base = OTHER; note = 1-deoxy-1-(adenin-9-yl)-alpha-L-threofuranose 2-phosphate
  modified_base 12: mod_base = OTHER; note = 2'-O-methylguanosine-3'-phosphate
  modified_base 13: mod_base = OTHER; note = 2'-O-methyladenosine-3'-phosphate
  modified_base 14: mod_base = OTHER; note = 2'-deoxy-2'-fluoroadenosine-3'-phosphate
  modified_base 15: mod_base = OTHER; note = 2'-O-methylcytidine-3'-phosphate
  modified_base 16: mod_base = OTHER; note = 2'-deoxy-2'-fluoroadenosine-3'-phosphate
  modified_base 17: mod_base = OTHER; note = 2'-O-methylcytidine-3'-phosphate
  modified_base 18: mod_base = OTHER; note = 2'-deoxy-2'-fluorouridine-3'-phosphate
  modified_base 19: mod_base = OTHER; note = 2'-O-methylguanosine-3'-phosphate
  modified_base 20: mod_base = OTHER; note = 2'-deoxy-2'-fluorouridine-3'-phosphate
  modified_base 21: mod_base = OTHER; note = 2'-O-methyluridine-3'-phosphorothioate
  modified_base 22: mod_base = OTHER; note = 2'-O-methyluridine-3'-phosphorothioate
  modified_base 23: mod_base = OTHER; note = 2'-O-methyluridine
ttatagagcaagaacactgtttt

SEQ ID NO: 581 - RNA, 23 nt, synthetic construct
  source 1..23: mol_type = other RNA
  modified_base 1: mod_base = OTHER; note = 2'-O-methyluridine-3'-phosphorothioate
  modified_base 2: mod_base = OTHER; note = 2'-deoxy-2'-fluorouridine-3'-phosphorothioate
  modified_base 3: mod_base = OTHER; note = 2'-O-methyladenosine-3'-phosphate
  modified_base 4: mod_base = OTHER; note = 2'-deoxy-2'-fluorouridine-3'-phosphate
  modified_base 5: mod_base = OTHER; note = 2'-O-methyladenosine-3'-phosphate
  modified_base 6: mod_base = OTHER; note = 2'-deoxy-2'-fluoroguanosine-3'-phosphate
  modified_base 7: mod_base = OTHER; note = 2'-O-methyladenosine-3'-phosphate
  modified_base 8: mod_base = OTHER; note = 2'-deoxy-2'-fluoroguanosine-3'-phosphate
  modified_base 9: mod_base = OTHER; note = 2'-O-methylcytidine-3'-phosphate
  modified_base 10: mod_base = OTHER; note = 2'-deoxy-2'-fluoroadenosine-3'-phosphate
  modified_base 11: mod_base = OTHER; note = 2'-O-methyladenosine-3'-phosphate
  modified_base 12: mod_base = OTHER; note = 1-deoxy-1-(guanin-9-yl)-alpha-L-threofuranose 2-phosphate
  modified_base 13: mod_base = OTHER; note = 2'-O-methyladenosine-3'-phosphate
  modified_base 14: mod_base = OTHER; note = 2'-deoxy-2'-fluoroadenosine-3'-phosphate
  modified_base 15: mod_base = OTHER; note = 2'-O-methylcytidine-3'-phosphate
  modified_base 16: mod_base = OTHER; note = 2'-deoxy-2'-fluoroadenosine-3'-phosphate
  modified_base 17: mod_base = OTHER; note = 2'-O-methylcytidine-3'-phosphate
  modified_base 18: mod_base = OTHER; note = 2'-deoxy-2'-fluorouridine-3'-phosphate
  modified_base 19: mod_base = OTHER; note = 2'-O-methylguanosine-3'-phosphate
  modified_base 20: mod_base = OTHER; note = 2'-deoxy-2'-fluorouridine-3'-phosphate
  modified_base 21: mod_base = OTHER; note = 2'-O-methyluridine-3'-phosphorothioate
  modified_base 22: mod_base = OTHER; note = 2'-O-methyluridine-3'-phosphorothioate
  modified_base 23: mod_base = OTHER; note = 2'-O-methyluridine
ttatagagcaagaacactgtttt

SEQ ID NO: 582 - RNA, 23 nt, synthetic construct
  source 1..23: mol_type = other RNA
  modified_base 1: mod_base = OTHER; note = 2'-O-methyluridine-3'-phosphorothioate
  modified_base 2: mod_base = OTHER; note = 2'-deoxy-2'-fluorouridine-3'-phosphorothioate
  modified_base 3: mod_base = OTHER; note = 2'-O-methyladenosine-3'-phosphate
  modified_base 4: mod_base = OTHER; note = 2'-deoxy-2'-fluorouridine-3'-phosphate
  modified_base 5: mod_base = OTHER; note = 2'-O-methyladenosine-3'-phosphate
  modified_base 6: mod_base = OTHER; note = 2'-deoxy-2'-fluoroguanosine-3'-phosphate
  modified_base 7: mod_base = OTHER; note = 2'-O-methyladenosine-3'-phosphate
  modified_base 8: mod_base = OTHER; note = 2'-deoxy-2'-fluoroguanosine-3'-phosphate
  modified_base 9: mod_base = OTHER; note = 2'-O-methylcytidine-3'-phosphate
  modified_base 10: mod_base = OTHER; note = 2'-deoxy-2'-fluoroadenosine-3'-phosphate
  modified_base 11: mod_base = OTHER; note = 2'-O-methyladenosine-3'-phosphate
  modified_base 12: mod_base = OTHER; note = 2'-O-methylguanosine-3'-phosphate
  modified_base 13: mod_base = OTHER; note = 1-deoxy-1-(adenin-9-yl)-alpha-L-threofuranose 2-phosphate
  modified_base 14: mod_base = OTHER; note = 2'-deoxy-2'-fluoroadenosine-3'-phosphate
  modified_base 15: mod_base = OTHER; note = 2'-O-methylcytidine-3'-phosphate
  modified_base 16: mod_base = OTHER; note = 2'-deoxy-2'-fluoroadenosine-3'-phosphate
  modified_base 17: mod_base = OTHER; note = 2'-O-methylcytidine-3'-phosphate
  modified_base 18: mod_base = OTHER; note = 2'-deoxy-2'-fluorouridine-3'-phosphate
  modified_base 19: mod_base = OTHER; note = 2'-O-methylguanosine-3'-phosphate
  modified_base 20: mod_base = OTHER; note = 2'-deoxy-2'-fluorouridine-3'-phosphate
  modified_base 21: mod_base = OTHER; note = 2'-O-methyluridine-3'-phosphorothioate
  modified_base 22: mod_base = OTHER; note = 2'-O-methyluridine-3'-phosphorothioate
  modified_base 23: mod_base = OTHER; note = 2'-O-methyluridine
ttatagagcaagaacactgtttt

SEQ ID NO: 583 - RNA, 23 nt, synthetic construct
  source 1..23: mol_type = other RNA
  modified_base 1: mod_base = OTHER; note = 2'-O-methyluridine-3'-phosphorothioate
  modified_base 2: mod_base = OTHER; note = 2'-deoxy-2'-fluorouridine-3'-phosphorothioate
  modified_base 3: mod_base = OTHER; note = 2'-O-methyladenosine-3'-phosphate
  modified_base 4: mod_base = OTHER; note = 2'-deoxy-2'-fluorouridine-3'-phosphate
  modified_base 5: mod_base = OTHER; note = 2'-O-methyladenosine-3'-phosphate
  modified_base 6: mod_base = OTHER; note = 2'-deoxy-2'-fluoroguanosine-3'-phosphate
  modified_base 7: mod_base = OTHER; note = 2'-O-methyladenosine-3'-phosphate
  modified_base 8: mod_base = OTHER; note = 2'-deoxy-2'-fluoroguanosine-3'-phosphate
  modified_base 9: mod_base = OTHER; note = 2'-O-methylcytidine-3'-phosphate
  modified_base 10: mod_base = OTHER; note = 2'-deoxy-2'-fluoroadenosine-3'-phosphate
  modified_base 11: mod_base = OTHER; note = 2'-O-methyladenosine-3'-phosphate
  modified_base 12: mod_base = OTHER; note = 2'-O-methylguanosine-3'-phosphate
  modified_base 13: mod_base = OTHER; note = 2'-O-methyladenosine-3'-phosphate
  modified_base 14: mod_base = OTHER; note = 1-deoxy-1-(adenin-9-yl)-alpha-L-threofuranose 2-phosphate
  modified_base 15: mod_base = OTHER; note = 2'-O-methylcytidine-3'-phosphate
  modified_base 16: mod_base = OTHER; note = 2'-deoxy-2'-fluoroadenosine-3'-phosphate
  modified_base 17: mod_base = OTHER; note = 2'-O-methylcytidine-3'-phosphate
  modified_base 18: mod_base = OTHER; note = 2'-deoxy-2'-fluorouridine-3'-phosphate
  modified_base 19: mod_base = OTHER; note = 2'-O-methylguanosine-3'-phosphate
  modified_base 20: mod_base = OTHER; note = 2'-deoxy-2'-fluorouridine-3'-phosphate
  modified_base 21: mod_base = OTHER; note = 2'-O-methyluridine-3'-phosphorothioate
  modified_base 22: mod_base = OTHER; note = 2'-O-methyluridine-3'-phosphorothioate
  modified_base 23: mod_base = OTHER; note = 2'-O-methyluridine
ttatagagcaagaacactgtttt

SEQ ID NO: 584 - RNA, 23 nt, synthetic construct
  source 1..23: mol_type = other RNA
  modified_base 1: mod_base = OTHER; note = 2'-O-methyluridine-3'-phosphorothioate
  modified_base 2: mod_base = OTHER; note = 2'-deoxy-2'-fluorouridine-3'-phosphorothioate
  modified_base 3: mod_base = OTHER; note = 2'-O-methyladenosine-3'-phosphate
  modified_base 4: mod_base = OTHER; note = 2'-deoxy-2'-fluorouridine-3'-phosphate
  modified_base 5: mod_base = OTHER; note = 2'-O-methyladenosine-3'-phosphate
  modified_base 6: mod_base = OTHER; note = 2'-deoxy-2'-fluoroguanosine-3'-phosphate
  modified_base 7: mod_base = OTHER; note = 2'-O-methyladenosine-3'-phosphate
  modified_base 8: mod_base = OTHER; note = 2'-deoxy-2'-fluoroguanosine-3'-phosphate
  modified_base 9: mod_base = OTHER; note = 2'-O-methylcytidine-3'-phosphate
  modified_base 10: mod_base = OTHER; note = 2'-deoxy-2'-fluoroadenosine-3'-phosphate
  modified_base 11: mod_base = OTHER; note = 2'-O-methyladenosine-3'-phosphate
  modified_base 12: mod_base = OTHER; note = 2'-O-methylguanosine-3'-phosphate
  modified_base 13: mod_base = OTHER; note = 2'-O-methyladenosine-3'-phosphate
  modified_base 14: mod_base = OTHER; note = 2'-deoxy-2'-fluoroadenosine-3'-phosphate
  modified_base 15: mod_base = OTHER; note 1-deoxy-1-(5-methylcytosin-1-yl)-alpha-L-threofuranose 2-phosphate
  modified_base 16: mod_base = OTHER; note = 2'-deoxy-2'-fluoroadenosine-3'-phosphate
  modified_base 17: mod_base = OTHER; note = 2'-O-methylcytidine-3'-phosphate
  modified_base 18: mod_base = OTHER; note = 2'-deoxy-2'-fluorouridine-3'-phosphate
  modified_base 19: mod_base = OTHER; note = 2'-O-methylguanosine-3'-phosphate
  modified_base 20: mod_base = OTHER; note = 2'-deoxy-2'-fluorouridine-3'-phosphate
  modified_base 21: mod_base = OTHER; note = 2'-O-methyluridine-3'-phosphorothioate
  modified_base 22: mod_base = OTHER; note = 2'-O-methyluridine-3'-phosphorothioate
  modified_base 23: mod_base = OTHER; note = 2'-O-methyluridine
ttatagagcaagaacactgtttt

SEQ ID NO: 585 - RNA, 23 nt, synthetic construct
  source 1..23: mol_type = other RNA
  modified_base 1: mod_base = OTHER; note = 2'-O-methyluridine-3'-phosphorothioate
  modified_base 2: mod_base = OTHER; note = 2'-deoxy-2'-fluorouridine-3'-phosphorothioate
  modified_base 3: mod_base = OTHER; note = 2'-O-methyladenosine-3'-phosphate
  modified_base 4: mod_base = OTHER; note = 2'-deoxy-2'-fluorouridine-3'-phosphate
  modified_base 5: mod_base = OTHER; note = 2'-O-methyladenosine-3'-phosphate
  modified_base 6: mod_base = OTHER; note = 2'-deoxy-2'-fluoroguanosine-3'-phosphate
  modified_base 7: mod_base = OTHER; note = 2'-O-methyladenosine-3'-phosphate
  modified_base 8: mod_base = OTHER; note = 2'-deoxy-2'-fluoroguanosine-3'-phosphate
  modified_base 9: mod_base = OTHER; note = 2'-O-methylcytidine-3'-phosphate
  modified_base 10: mod_base = OTHER; note = 2'-deoxy-2'-fluoroadenosine-3'-phosphate
  modified_base 11: mod_base = OTHER; note = 2'-O-methyladenosine-3'-phosphate
  modified_base 12: mod_base = OTHER; note = 2'-O-methylguanosine-3'-phosphate
  modified_base 13: mod_base = OTHER; note = 2'-O-methyladenosine-3'-phosphate
  modified_base 14: mod_base = OTHER; note = 2'-deoxy-2'-fluoroadenosine-3'-phosphate
  modified_base 15: mod_base = OTHER; note = 2'-O-methylcytidine-3'-phosphate
  modified_base 16: mod_base = OTHER; note = 1-deoxy-1-(adenin-9-yl)-alpha-L-threofuranose 2-phosphate
  modified_base 17: mod_base = OTHER; note = 2'-O-methylcytidine-3'-phosphate
  modified_base 18: mod_base = OTHER; note = 2'-deoxy-2'-fluorouridine-3'-phosphate
  modified_base 19: mod_base = OTHER; note = 2'-O-methylguanosine-3'-phosphate
  modified_base 20: mod_base = OTHER; note = 2'-deoxy-2'-fluorouridine-3'-phosphate
  modified_base 21: mod_base = OTHER; note = 2'-O-methyluridine-3'-phosphorothioate
  modified_base 22: mod_base = OTHER; note = 2'-O-methyluridine-3'-phosphorothioate
  modified_base 23: mod_base = OTHER; note = 2'-O-methyluridine
ttatagagcaagaacactgtttt

SEQ ID NO: 586 - RNA, 23 nt, synthetic construct
  source 1..23: mol_type = other RNA
  modified_base 1: mod_base = OTHER; note = 2'-O-methyluridine-3'-phosphorothioate
  modified_base 2: mod_base = OTHER; note = 2'-deoxy-2'-fluorouridine-3'-phosphorothioate
  modified_base 3: mod_base = OTHER; note = 2'-O-methyladenosine-3'-phosphate
  modified_base 4: mod_base = OTHER; note = 2'-deoxy-2'-fluorouridine-3'-phosphate
  modified_base 5: mod_base = OTHER; note = 2'-O-methyladenosine-3'-phosphate
  modified_base 6: mod_base = OTHER; note = 2'-deoxy-2'-fluoroguanosine-3'-phosphate
  modified_base 7: mod_base = OTHER; note = 2'-O-methyladenosine-3'-phosphate
  modified_base 8: mod_base = OTHER; note = 2'-deoxy-2'-fluoroguanosine-3'-phosphate
  modified_base 9: mod_base = OTHER; note = 2'-O-methylcytidine-3'-phosphate
  modified_base 10: mod_base = OTHER; note = 2'-deoxy-2'-fluoroadenosine-3'-phosphate
  modified_base 11: mod_base = OTHER; note = 2'-O-methyladenosine-3'-phosphate
  modified_base 12: mod_base = OTHER; note = 2'-O-methylguanosine-3'-phosphate
  modified_base 13: mod_base = OTHER; note = 2'-O-methyladenosine-3'-phosphate
  modified_base 14: mod_base = OTHER; note = 2'-deoxy-2'-fluoroadenosine-3'-phosphate
  modified_base 15: mod_base = OTHER; note = 2'-O-methylcytidine-3'-phosphate
  modified_base 16: mod_base = OTHER; note = 2'-deoxy-2'-fluoroadenosine-3'-phosphate
  modified_base 17: mod_base = OTHER; note 1-deoxy-1-(5-methylcytosin-1-yl)-alpha-L-threofuranose 2-phosphate
  modified_base 18: mod_base = OTHER; note = 2'-deoxy-2'-fluorouridine-3'-phosphate
  modified_base 19: mod_base = OTHER; note = 2'-O-methylguanosine-3'-phosphate
  modified_base 20: mod_base = OTHER; note = 2'-deoxy-2'-fluorouridine-3'-phosphate
  modified_base 21: mod_base = OTHER; note = 2'-O-methyluridine-3'-phosphorothioate
  modified_base 22: mod_base = OTHER; note = 2'-O-methyluridine-3'-phosphorothioate
  modified_base 23: mod_base = OTHER; note = 2'-O-methyluridine
ttatagagcaagaacactgtttt

SEQ ID NO: 587 - RNA, 23 nt, synthetic construct
  source 1..23: mol_type = other RNA
  modified_base 1: mod_base = OTHER; note = 2'-O-methyluridine-3'-phosphorothioate
  modified_base 2: mod_base = OTHER; note = 2'-deoxy-2'-fluorouridine-3'-phosphorothioate
  modified_base 3: mod_base = OTHER; note = 2'-O-methyladenosine-3'-phosphate
  modified_base 4: mod_base = OTHER; note = 2'-deoxy-2'-fluorouridine-3'-phosphate
  modified_base 5: mod_base = OTHER; note = 2'-O-methyladenosine-3'-phosphate
  modified_base 6: mod_base = OTHER; note = 2'-deoxy-2'-fluoroguanosine-3'-phosphate
  modified_base 7: mod_base = OTHER; note = 2'-O-methyladenosine-3'-phosphate
  modified_base 8: mod_base = OTHER; note = 2'-deoxy-2'-fluoroguanosine-3'-phosphate
  modified_base 9: mod_base = OTHER; note = 2'-O-methylcytidine-3'-phosphate
  modified_base 10: mod_base = OTHER; note = 2'-deoxy-2'-fluoroadenosine-3'-phosphate
  modified_base 11: mod_base = OTHER; note = 2'-O-methyladenosine-3'-phosphate
  modified_base 12: mod_base = OTHER; note = 2'-O-methylguanosine-3'-phosphate
  modified_base 13: mod_base = OTHER; note = 2'-O-methyladenosine-3'-phosphate
  modified_base 14: mod_base = OTHER; note = 2'-deoxy-2'-fluoroadenosine-3'-phosphate
  modified_base 15: mod_base = OTHER; note = 2'-O-methylcytidine-3'-phosphate
  modified_base 16: mod_base = OTHER; note = 2'-deoxy-2'-fluoroadenosine-3'-phosphate
  modified_base 17: mod_base = OTHER; note = 2'-O-methylcytidine-3'-phosphate
  modified_base 18: mod_base = OTHER; note = 1-deoxy-1-(thymin-1-yl)-alpha-L-threofuranose 2-phosphate
  modified_base 19: mod_base = OTHER; note = 2'-O-methylguanosine-3'-phosphate
  modified_base 20: mod_base = OTHER; note = 2'-deoxy-2'-fluorouridine-3'-phosphate
  modified_base 21: mod_base = OTHER; note = 2'-O-methyluridine-3'-phosphorothioate
  modified_base 22: mod_base = OTHER; note = 2'-O-methyluridine-3'-phosphorothioate
  modified_base 23: mod_base = OTHER; note = 2'-O-methyluridine
ttatagagcaagaacactgtttt

SEQ ID NO: 588 - RNA, 23 nt, synthetic construct
  source 1..23: mol_type = other RNA
  modified_base 1: mod_base = OTHER; note = 2'-O-methyluridine-3'-phosphorothioate
  modified_base 2: mod_base = OTHER; note = 2'-deoxy-2'-fluorouridine-3'-phosphorothioate
  modified_base 3: mod_base = OTHER; note = 2'-O-methyladenosine-3'-phosphate
  modified_base 4: mod_base = OTHER; note = 2'-deoxy-2'-fluorouridine-3'-phosphate
  modified_base 5: mod_base = OTHER; note = 2'-O-methyladenosine-3'-phosphate
  modified_base 6: mod_base = OTHER; note = 2'-deoxy-2'-fluoroguanosine-3'-phosphate
  modified_base 7: mod_base = OTHER; note = 2'-O-methyladenosine-3'-phosphate
  modified_base 8: mod_base = OTHER; note = 2'-deoxy-2'-fluoroguanosine-3'-phosphate
  modified_base 9: mod_base = OTHER; note = 2'-O-methylcytidine-3'-phosphate
  modified_base 10: mod_base = OTHER; note = 2'-deoxy-2'-fluoroadenosine-3'-phosphate
  modified_base 11: mod_base = OTHER; note = 2'-O-methyladenosine-3'-phosphate
  modified_base 12: mod_base = OTHER; note = 2'-O-methylguanosine-3'-phosphate
  modified_base 13: mod_base = OTHER; note = 2'-O-methyladenosine-3'-phosphate
  modified_base 14: mod_base = OTHER; note = 2'-deoxy-2'-fluoroadenosine-3'-phosphate
  modified_base 15: mod_base = OTHER; note = 2'-O-methylcytidine-3'-phosphate
  modified_base 16: mod_base = OTHER; note = 2'-deoxy-2'-fluoroadenosine-3'-phosphate
  modified_base 17: mod_base = OTHER; note = 2'-O-methylcytidine-3'-phosphate
  modified_base 18: mod_base = OTHER; note = 2'-deoxy-2'-fluorouridine-3'-phosphate
  modified_base 19: mod_base = OTHER; note = 1-deoxy-1-(guanin-9-yl)-alpha-L-threofuranose 2-phosphate
  modified_base 20: mod_base = OTHER; note = 2'-deoxy-2'-fluorouridine-3'-phosphate
  modified_base 21: mod_base = OTHER; note = 2'-O-methyluridine-3'-phosphorothioate
  modified_base 22: mod_base = OTHER; note = 2'-O-methyluridine-3'-phosphorothioate
  modified_base 23: mod_base = OTHER; note = 2'-O-methyluridine
ttatagagcaagaacactgtttt

SEQ ID NO: 589 - RNA, 23 nt, synthetic construct
  source 1..23: mol_type = other RNA
  modified_base 1: mod_base = OTHER; note = 2'-O-methyluridine-3'-phosphorothioate
  modified_base 2: mod_base = OTHER; note = 2'-deoxy-2'-fluorouridine-3'-phosphorothioate
  modified_base 3: mod_base = OTHER; note = 2'-O-methyladenosine-3'-phosphate
  modified_base 4: mod_base = OTHER; note = 2'-deoxy-2'-fluorouridine-3'-phosphate
  modified_base 5: mod_base = OTHER; note = 2'-O-methyladenosine-3'-phosphate
  modified_base 6: mod_base = OTHER; note = 2'-deoxy-2'-fluoroguanosine-3'-phosphate
  modified_base 7: mod_base = OTHER; note = 2'-O-methyladenosine-3'-phosphate
  modified_base 8: mod_base = OTHER; note = 2'-deoxy-2'-fluoroguanosine-3'-phosphate
  modified_base 9: mod_base = OTHER; note = 2'-O-methylcytidine-3'-phosphate
  modified_base 10: mod_base = OTHER; note = 2'-deoxy-2'-fluoroadenosine-3'-phosphate
  modified_base 11: mod_base = OTHER; note = 2'-O-methyladenosine-3'-phosphate
  modified_base 12: mod_base = OTHER; note = 2'-O-methylguanosine-3'-phosphate
  modified_base 13: mod_base = OTHER; note = 2'-O-methyladenosine-3'-phosphate
  modified_base 14: mod_base = OTHER; note = 2'-deoxy-2'-fluoroadenosine-3'-phosphate
  modified_base 15: mod_base = OTHER; note = 2'-O-methylcytidine-3'-phosphate
  modified_base 16: mod_base = OTHER; note = 2'-deoxy-2'-fluoroadenosine-3'-phosphate
  modified_base 17: mod_base = OTHER; note = 2'-O-methylcytidine-3'-phosphate
  modified_base 18: mod_base = OTHER; note = 2'-deoxy-2'-fluorouridine-3'-phosphate
  modified_base 19: mod_base = OTHER; note = 2'-O-methylguanosine-3'-phosphate
  modified_base 20: mod_base = OTHER; note = 1-deoxy-1-(thymin-1-yl)-alpha-L-threofuranose 2-phosphate
  modified_base 21: mod_base = OTHER; note = 2'-O-methyluridine-3'-phosphorothioate
  modified_base 22: mod_base = OTHER; note = 2'-O-methyluridine-3'-phosphorothioate
  modified_base 23: mod_base = OTHER; note = 2'-O-methyluridine
ttatagagcaagaacactgtttt

SEQ ID NO: 590 - RNA, 23 nt, synthetic construct
  source 1..23: mol_type = other RNA
  modified_base 1: mod_base = OTHER; note = 2'-O-methyluridine-3'-phosphorothioate
  modified_base 2: mod_base = OTHER; note = 2'-deoxy-2'-fluorouridine-3'-phosphorothioate
  modified_base 3: mod_base = OTHER; note = 2'-O-methyladenosine-3'-phosphate
  modified_base 4: mod_base = OTHER; note = 2'-deoxy-2'-fluorouridine-3'-phosphate
  modified_base 5: mod_base = OTHER; note = 2'-O-methyladenosine-3'-phosphate
  modified_base 6: mod_base = OTHER; note = 2'-deoxy-2'-fluoroguanosine-3'-phosphate
  modified_base 7: mod_base = OTHER; note = 2'-O-methyladenosine-3'-phosphate
  modified_base 8: mod_base = OTHER; note = 2'-deoxy-2'-fluoroguanosine-3'-phosphate
  modified_base 9: mod_base = OTHER; note = 2'-O-methylcytidine-3'-phosphate
  modified_base 10: mod_base = OTHER; note = 2'-deoxy-2'-fluoroadenosine-3'-phosphate
  modified_base 11: mod_base = OTHER; note = 2'-O-methyladenosine-3'-phosphate
  modified_base 12: mod_base = OTHER; note = 2'-O-methylguanosine-3'-phosphate
  modified_base 13: mod_base = OTHER; note = 2'-O-methyladenosine-3'-phosphate
  modified_base 14: mod_base = OTHER; note = 2'-deoxy-2'-fluoroadenosine-3'-phosphate
  modified_base 15: mod_base = OTHER; note = 2'-O-methylcytidine-3'-phosphate
  modified_base 16: mod_base = OTHER; note = 2'-deoxy-2'-fluoroadenosine-3'-phosphate
  modified_base 17: mod_base = OTHER; note = 2'-O-methylcytidine-3'-phosphate
  modified_base 18: mod_base = OTHER; note = 2'-deoxy-2'-fluorouridine-3'-phosphate
  modified_base 19: mod_base = OTHER; note = 2'-O-methylguanosine-3'-phosphate
  modified_base 20: mod_base = OTHER; note = 2'-deoxy-2'-fluorouridine-3'-phosphate
  modified_base 21: mod_base = OTHER; note = 1-deoxy-1-(thymin-1-yl)-alpha-L-threofuranose 2-phosphorothioate
  modified_base 22: mod_base = OTHER; note = 2'-O-methyluridine-3'-phosphorothioate
  modified_base 23: mod_base = OTHER; note = 2'-O-methyluridine
ttatagagcaagaacactgtttt

SEQ ID NO: 591 - RNA, 23 nt, synthetic construct
  source 1..23: mol_type = other RNA
  modified_base 1: mod_base = OTHER; note = 2'-O-methyluridine-3'-phosphorothioate
  modified_base 2: mod_base = OTHER; note = 2'-deoxy-2'-fluorouridine-3'-phosphorothioate
  modified_base 3: mod_base = OTHER; note = 2'-O-methyladenosine-3'-phosphate
  modified_base 4: mod_base = OTHER; note = 2'-deoxy-2'-fluorouridine-3'-phosphate
  modified_base 5: mod_base = OTHER; note = 2'-O-methyladenosine-3'-phosphate
  modified_base 6: mod_base = OTHER; note = 2'-deoxy-2'-fluoroguanosine-3'-phosphate
  modified_base 7: mod_base = OTHER; note = 2'-O-methyladenosine-3'-phosphate
  modified_base 8: mod_base = OTHER; note = 2'-deoxy-2'-fluoroguanosine-3'-phosphate
  modified_base 9: mod_base = OTHER; note = 2'-O-methylcytidine-3'-phosphate
  modified_base 10: mod_base = OTHER; note = 2'-deoxy-2'-fluoroadenosine-3'-phosphate
  modified_base 11: mod_base = OTHER; note = 2'-O-methyladenosine-3'-phosphate
  modified_base 12: mod_base = OTHER; note = 2'-O-methylguanosine-3'-phosphate
  modified_base 13: mod_base = OTHER; note = 2'-O-methyladenosine-3'-phosphate
  modified_base 14: mod_base = OTHER; note = 2'-deoxy-2'-fluoroadenosine-3'-phosphate
  modified_base 15: mod_base = OTHER; note = 2'-O-methylcytidine-3'-phosphate
  modified_base 16: mod_base = OTHER; note = 2'-deoxy-2'-fluoroadenosine-3'-phosphate
  modified_base 17: mod_base = OTHER; note = 2'-O-methylcytidine-3'-phosphate
  modified_base 18: mod_base = OTHER; note = 2'-deoxy-2'-fluorouridine-3'-phosphate
  modified_base 19: mod_base = OTHER; note = 2'-O-methylguanosine-3'-phosphate
  modified_base 20: mod_base = OTHER; note = 2'-deoxy-2'-fluorouridine-3'-phosphate
  modified_base 21: mod_base = OTHER; note = 2'-O-methyluridine-3'-phosphorothioate
  modified_base 22: mod_base = OTHER; note = 1-deoxy-1-(thymin-1-yl)-alpha-L-threofuranose 2-phosphorothioate
  modified_base 23: mod_base = OTHER; note = 2'-O-methyluridine
ttatagagcaagaacactgtttt

SEQ ID NO: 592 - RNA, 23 nt, synthetic construct
  source 1..23: mol_type = other RNA
  modified_base 1: mod_base = OTHER; note = 2'-O-methyluridine-3'-phosphorothioate
  modified_base 2: mod_base = OTHER; note = 2'-deoxy-2'-fluorouridine-3'-phosphorothioate
  modified_base 3: mod_base = OTHER; note = 2'-O-methyladenosine-3'-phosphate
  modified_base 4: mod_base = OTHER; note = 2'-deoxy-2'-fluorouridine-3'-phosphate
  modified_base 5: mod_base = OTHER; note = 2'-O-methyladenosine-3'-phosphate
  modified_base 6: mod_base = OTHER; note = 2'-deoxy-2'-fluoroguanosine-3'-phosphate
  modified_base 7: mod_base = OTHER; note = 2'-O-methyladenosine-3'-phosphate
  modified_base 8: mod_base = OTHER; note = 2'-deoxy-2'-fluoroguanosine-3'-phosphate
  modified_base 9: mod_base = OTHER; note = 2'-O-methylcytidine-3'-phosphate
  modified_base 10: mod_base = OTHER; note = 2'-deoxy-2'-fluoroadenosine-3'-phosphate
  modified_base 11: mod_base = OTHER; note = 2'-O-methyladenosine-3'-phosphate
  modified_base 12: mod_base = OTHER; note = 2'-O-methylguanosine-3'-phosphate
  modified_base 13: mod_base = OTHER; note = 2'-O-methyladenosine-3'-phosphate
  modified_base 14: mod_base = OTHER; note = 2'-deoxy-2'-fluoroadenosine-3'-phosphate
  modified_base 15: mod_base = OTHER; note = 2'-O-methylcytidine-3'-phosphate
  modified_base 16: mod_base = OTHER; note = 2'-deoxy-2'-fluoroadenosine-3'-phosphate
  modified_base 17: mod_base = OTHER; note = 2'-O-methylcytidine-3'-phosphate
  modified_base 18: mod_base = OTHER; note = 2'-deoxy-2'-fluorouridine-3'-phosphate
  modified_base 19: mod_base = OTHER; note = 2'-O-methylguanosine-3'-phosphate
  modified_base 20: mod_base = OTHER; note = 2'-deoxy-2'-fluorouridine-3'-phosphate
  modified_base 21: mod_base = OTHER; note = 2'-O-methyluridine-3'-phosphorothioate
  modified_base 22: mod_base = OTHER; note = 2'-O-methyluridine-3'-phosphorothioate
  modified_base 23: mod_base = OTHER; note = 1-deoxy-1-(thymin-1-yl)-alpha-L-threofuranose
ttatagagcaagaacactgtttt

SEQ ID NO: 593 - RNA, 23 nt, synthetic construct
  source 1..23: mol_type = other RNA
  modified_base 1: mod_base = OTHER; note = 2'-O-methyluridine-3'-phosphorothioate
  modified_base 2: mod_base = OTHER; note = 2'-deoxy-2'-fluorouridine-3'-phosphorothioate
  modified_base 3: mod_base = OTHER; note = 2'-O-methyladenosine-3'-phosphate
  modified_base 4: mod_base = OTHER; note = 2'-deoxy-2'-fluorouridine-3'-phosphate
  modified_base 5: mod_base = OTHER; note = 2'-O-methyladenosine-3'-phosphate
  modified_base 6: mod_base = OTHER; note = 2'-deoxy-2'-fluoroguanosine-3'-phosphate
  modified_base 7: mod_base = OTHER; note = 2'-O-methyladenosine-3'-phosphate
  modified_base 8: mod_base = OTHER; note = 2'-deoxy-2'-fluoroguanosine-3'-phosphate
  modified_base 9: mod_base = OTHER; note = 2'-O-methylcytidine-3'-phosphate
  modified_base 10: mod_base = OTHER; note = 2'-deoxy-2'-fluoroadenosine-3'-phosphate
  modified_base 11: mod_base = OTHER; note = 2'-O-methyladenosine-3'-phosphate
  modified_base 12: mod_base = OTHER; note = 2'-O-methylguanosine-3'-phosphate
  modified_base 13: mod_base = OTHER; note = 2'-O-methyladenosine-3'-phosphate
  modified_base 14: mod_base = OTHER; note = 2'-deoxy-2'-fluoroadenosine-3'-phosphate
  modified_base 15: mod_base = OTHER; note = 2'-O-methylcytidine-3'-phosphate
  modified_base 16: mod_base = OTHER; note = 2'-deoxy-2'-fluoroadenosine-3'-phosphate
  modified_base 17: mod_base = OTHER; note = 2'-O-methylcytidine-3'-phosphate
  modified_base 18: mod_base = OTHER; note = 2'-deoxy-2'-fluorouridine-3'-phosphate
  modified_base 19: mod_base = OTHER; note = 2'-O-methylguanosine-3'-phosphate
  modified_base 20: mod_base = OTHER; note = 2'-deoxy-2'-fluorouridine-3'-phosphate
  modified_base 21: mod_base = OTHER; note = 2'-O-methyluridine-3'-phosphorothioate
  modified_base 22: mod_base = OTHER; note = 2'-O-methyluridine-3'-phosphorothioate
  modified_base 23: mod_base = OTHER; note = 2'-O-methyluridine
ttatagagcaagaacactgtttt

SEQ ID NO: 594 - RNA, 23 nt, synthetic construct
  source 1..23: mol_type = other RNA
  modified_base 1: mod_base = OTHER; note = 2'-O-methyluridine-3'-phosphorothioate
  modified_base 2: mod_base = OTHER; note = 2'-deoxy-2'-fluorouridine-3'-phosphorothioate
  modified_base 3: mod_base = OTHER; note = 2'-O-methyladenosine-3'-phosphate
  modified_base 4: mod_base = OTHER; note = 2'-deoxy-2'-fluorouridine-3'-phosphate
  modified_base 5: mod_base = OTHER; note = 2'-O-methyladenosine-3'-phosphate
  modified_base 6: mod_base = OTHER; note = 2'-deoxy-2'-fluoroguanosine-3'-phosphate
  modified_base 7: mod_base = OTHER; note = 2'-O-methyladenosine-3'-phosphate
  modified_base 8: mod_base = OTHER; note = 2'-deoxy-2'-fluoroguanosine-3'-phosphate
  modified_base 9: mod_base = OTHER; note = 2'-O-methylcytidine-3'-phosphate
  modified_base 10: mod_base = OTHER; note = 2'-deoxy-2'-fluoroadenosine-3'-phosphate
  modified_base 11: mod_base = OTHER; note = 2'-O-methyladenosine-3'-phosphate
  modified_base 12: mod_base = OTHER; note = 2'-O-methylguanosine-3'-phosphate
  modified_base 13: mod_base = OTHER; note = 2'-O-methyladenosine-3'-phosphate
  modified_base 14: mod_base = OTHER; note = 2'-deoxy-2'-fluoroadenosine-3'-phosphate
  modified_base 15: mod_base = OTHER; note = 2'-O-methylcytidine-3'-phosphate
  modified_base 16: mod_base = OTHER; note = 2'-deoxy-2'-fluoroadenosine-3'-phosphate
  modified_base 17: mod_base = OTHER; note = 2'-O-methylcytidine-3'-phosphate
  modified_base 18: mod_base = OTHER; note = 2'-deoxy-2'-fluorouridine-3'-phosphate
  modified_base 19: mod_base = OTHER; note = 2'-O-methylguanosine-3'-phosphate
  modified_base 20: mod_base = OTHER; note = 2'-deoxy-2'-fluorouridine-3'-phosphate
  modified_base 21: mod_base = OTHER; note = 1-deoxy-1-(thymin-1-yl)-alpha-L-threofuranose 2-phosphorothioate
  modified_base 22: mod_base = OTHER; note = 2'-O-methyluridine-3'-phosphorothioate
  modified_base 23: mod_base = OTHER; note = 2'-O-methyluridine
ttatagagcaagaacactgtttt

SEQ ID NO: 595 - RNA, 23 nt, synthetic construct
  source 1..23: mol_type = other RNA
  modified_base 1: mod_base = OTHER; note = 2'-O-methyluridine-3'-phosphorothioate
  modified_base 2: mod_base = OTHER; note = 2'-deoxy-2'-fluorouridine-3'-phosphorothioate
  modified_base 3: mod_base = OTHER; note = 2'-O-methyladenosine-3'-phosphate
  modified_base 4: mod_base = OTHER; note = 2'-deoxy-2'-fluorouridine-3'-phosphate
  modified_base 5: mod_base = OTHER; note = 2'-O-methyladenosine-3'-phosphate
  modified_base 6: mod_base = OTHER; note = 2'-deoxy-2'-fluoroguanosine-3'-phosphate
  modified_base 7: mod_base = OTHER; note = 2'-O-methyladenosine-3'-phosphate
  modified_base 8: mod_base = OTHER; note = 2'-deoxy-2'-fluoroguanosine-3'-phosphate
  modified_base 9: mod_base = OTHER; note = 2'-O-methylcytidine-3'-phosphate
  modified_base 10: mod_base = OTHER; note = 2'-deoxy-2'-fluoroadenosine-3'-phosphate
  modified_base 11: mod_base = OTHER; note = 2'-O-methyladenosine-3'-phosphate
  modified_base 12: mod_base = OTHER; note = 2'-O-methylguanosine-3'-phosphate
  modified_base 13: mod_base = OTHER; note = 2'-O-methyladenosine-3'-phosphate
  modified_base 14: mod_base = OTHER; note = 2'-deoxy-2'-fluoroadenosine-3'-phosphate
  modified_base 15: mod_base = OTHER; note = 2'-O-methylcytidine-3'-phosphate
  modified_base 16: mod_base = OTHER; note = 2'-deoxy-2'-fluoroadenosine-3'-phosphate
  modified_base 17: mod_base = OTHER; note = 2'-O-methylcytidine-3'-phosphate
  modified_base 18: mod_base = OTHER; note = 2'-deoxy-2'-fluorouridine-3'-phosphate
  modified_base 19: mod_base = OTHER; note = 2'-O-methylguanosine-3'-phosphate
  modified_base 20: mod_base = OTHER; note = 1-deoxy-1-(thymin-1-yl)-alpha-L-threofuranose 2-phosphate
  modified_base 21: mod_base = OTHER; note = 2'-O-methyluridine-3'-phosphorothioate
  modified_base 22: mod_base = OTHER; note = 2'-O-methyluridine-3'-phosphorothioate
  modified_base 23: mod_base = OTHER; note = 2'-O-methyluridine
ttatagagcaagaacactgtttt

SEQ ID NO: 596 - RNA, 23 nt, synthetic construct
  source 1..23: mol_type = other RNA
  modified_base 1: mod_base = OTHER; note = 2'-O-methyluridine-3'-phosphorothioate
  modified_base 2: mod_base = OTHER; note = 2'-deoxy-2'-fluorouridine-3'-phosphorothioate
  modified_base 3: mod_base = OTHER; note = 2'-O-methyladenosine-3'-phosphate
  modified_base 4: mod_base = OTHER; note = 2'-deoxy-2'-fluorouridine-3'-phosphate
  modified_base 5: mod_base = OTHER; note = 2'-O-methyladenosine-3'-phosphate
  modified_base 6: mod_base = OTHER; note = 2'-deoxy-2'-fluoroguanosine-3'-phosphate
  modified_base 7: mod_base = OTHER; note = 2'-O-methyladenosine-3'-phosphate
  modified_base 8: mod_base = OTHER; note = 2'-deoxy-2'-fluoroguanosine-3'-phosphate
  modified_base 9: mod_base = OTHER; note = 2'-O-methylcytidine-3'-phosphate
  modified_base 10: mod_base = OTHER; note = 2'-deoxy-2'-fluoroadenosine-3'-phosphate
  modified_base 11: mod_base = OTHER; note = 2'-O-methyladenosine-3'-phosphate
  modified_base 12: mod_base = OTHER; note = 2'-O-methylguanosine-3'-phosphate
  modified_base 13: mod_base = OTHER; note = 2'-O-methyladenosine-3'-phosphate
  modified_base 14: mod_base = OTHER; note = 2'-deoxy-2'-fluoroadenosine-3'-phosphate
  modified_base 15: mod_base = OTHER; note = 2'-O-methylcytidine-3'-phosphate
  modified_base 16: mod_base = OTHER; note = 2'-deoxy-2'-fluoroadenosine-3'-phosphate
  modified_base 17: mod_base = OTHER; note = 2'-O-methylcytidine-3'-phosphate
  modified_base 18: mod_base = OTHER; note = 2'-deoxy-2'-fluorouridine-3'-phosphate
  modified_base 19: mod_base = OTHER; note = 1-deoxy-1-(guanin-9-yl)-alpha-L-threofuranose 2-phosphate
  modified_base 20: mod_base = OTHER; note = 2'-deoxy-2'-fluorouridine-3'-phosphate
  modified_base 21: mod_base = OTHER; note = 2'-O-methyluridine-3'-phosphorothioate
  modified_base 22: mod_base = OTHER; note = 2'-O-methyluridine-3'-phosphorothioate
  modified_base 23: mod_base = OTHER; note = 2'-O-methyluridine
ttatagagcaagaacactgtttt

SEQ ID NO: 597 - RNA, 23 nt, synthetic construct
  source 1..23: mol_type = other RNA
  modified_base 1: mod_base = OTHER; note = 2'-O-methyluridine-3'-phosphorothioate
  modified_base 2: mod_base = OTHER; note = 2'-deoxy-2'-fluorouridine-3'-phosphorothioate
  modified_base 3: mod_base = OTHER; note = 2'-O-methyladenosine-3'-phosphate
  modified_base 4: mod_base = OTHER; note = 2'-deoxy-2'-fluorouridine-3'-phosphate
  modified_base 5: mod_base = OTHER; note = 2'-O-methyladenosine-3'-phosphate
  modified_base 6: mod_base = OTHER; note = 2'-deoxy-2'-fluoroguanosine-3'-phosphate
  modified_base 7: mod_base = OTHER; note = 2'-O-methyladenosine-3'-phosphate
  modified_base 8: mod_base = OTHER; note = 2'-deoxy-2'-fluoroguanosine-3'-phosphate
  modified_base 9: mod_base = OTHER; note = 2'-O-methylcytidine-3'-phosphate
  modified_base 10: mod_base = OTHER; note = 2'-deoxy-2'-fluoroadenosine-3'-phosphate
  modified_base 11: mod_base = OTHER; note = 2'-O-methyladenosine-3'-phosphate
  modified_base 12: mod_base = OTHER; note = 2'-O-methylguanosine-3'-phosphate
  modified_base 13: mod_base = OTHER; note = 2'-O-methyladenosine-3'-phosphate
  modified_base 14: mod_base = OTHER; note = 2'-deoxy-2'-fluoroadenosine-3'-phosphate
  modified_base 15: mod_base = OTHER; note = 2'-O-methylcytidine-3'-phosphate
  modified_base 16: mod_base = OTHER; note = 2'-deoxy-2'-fluoroadenosine-3'-phosphate
  modified_base 17: mod_base = OTHER; note = 2'-O-methylcytidine-3'-phosphate
  modified_base 18: mod_base = OTHER; note = 1-deoxy-1-(thymin-1-yl)-alpha-L-threofuranose 2-phosphate
  modified_base 19: mod_base = OTHER; note = 2'-O-methylguanosine-3'-phosphate
  modified_base 20: mod_base = OTHER; note = 2'-deoxy-2'-fluorouridine-3'-phosphate
  modified_base 21: mod_base = OTHER; note = 2'-O-methyluridine-3'-phosphorothioate
  modified_base 22: mod_base = OTHER; note = 2'-O-methyluridine-3'-phosphorothioate
  modified_base 23: mod_base = OTHER; note = 2'-O-methyluridine
ttatagagcaagaacactgtttt

SEQ ID NO: 598 - RNA, 23 nt, synthetic construct
  source 1..23: mol_type = other RNA
  modified_base 1: mod_base = OTHER; note = 2'-O-methyluridine-3'-phosphorothioate
  modified_base 2: mod_base = OTHER; note = 2'-deoxy-2'-fluorouridine-3'-phosphorothioate
  modified_base 3: mod_base = OTHER; note = 2'-O-methyladenosine-3'-phosphate
  modified_base 4: mod_base = OTHER; note = 2'-deoxy-2'-fluorouridine-3'-phosphate
  modified_base 5: mod_base = OTHER; note = 2'-O-methyladenosine-3'-phosphate
  modified_base 6: mod_base = OTHER; note = 2'-deoxy-2'-fluoroguanosine-3'-phosphate
  modified_base 7: mod_base = OTHER; note = 2'-O-methyladenosine-3'-phosphate
  modified_base 8: mod_base = OTHER; note = 2'-deoxy-2'-fluoroguanosine-3'-phosphate
  modified_base 9: mod_base = OTHER; note = 2'-O-methylcytidine-3'-phosphate
  modified_base 10: mod_base = OTHER; note = 2'-deoxy-2'-fluoroadenosine-3'-phosphate
  modified_base 11: mod_base = OTHER; note = 2'-O-methyladenosine-3'-phosphate
  modified_base 12: mod_base = OTHER; note = 2'-O-methylguanosine-3'-phosphate
  modified_base 13: mod_base = OTHER; note = 2'-O-methyladenosine-3'-phosphate
  modified_base 14: mod_base = OTHER; note = 2'-deoxy-2'-fluoroadenosine-3'-phosphate
  modified_base 15: mod_base = OTHER; note = 2'-O-methylcytidine-3'-phosphate
  modified_base 16: mod_base = OTHER; note = 2'-deoxy-2'-fluoroadenosine-3'-phosphate
  modified_base 17: mod_base = OTHER; note 1-deoxy-1-(5-methylcytosin-1-yl)-alpha-L-threofuranose 2-phosphate
  modified_base 18: mod_base = OTHER; note = 2'-deoxy-2'-fluorouridine-3'-phosphate
  modified_base 19: mod_base = OTHER; note = 2'-O-methylguanosine-3'-phosphate
  modified_base 20: mod_base = OTHER; note = 2'-deoxy-2'-fluorouridine-3'-phosphate
  modified_base 21: mod_base = OTHER; note = 2'-O-methyluridine-3'-phosphorothioate
  modified_base 22: mod_base = OTHER; note = 2'-O-methyluridine-3'-phosphorothioate
  modified_base 23: mod_base = OTHER; note = 2'-O-methyluridine
ttatagagcaagaacactgtttt

SEQ ID NO: 599 - RNA, 23 nt, synthetic construct
  source 1..23: mol_type = other RNA
  modified_base 1: mod_base = OTHER; note = 2'-O-methyluridine-3'-phosphorothioate
  modified_base 2: mod_base = OTHER; note = 2'-deoxy-2'-fluorouridine-3'-phosphorothioate
  modified_base 3: mod_base = OTHER; note = 2'-O-methyladenosine-3'-phosphate
  modified_base 4: mod_base = OTHER; note = 2'-deoxy-2'-fluorouridine-3'-phosphate
  modified_base 5: mod_base = OTHER; note = 2'-O-methyladenosine-3'-phosphate
  modified_base 6: mod_base = OTHER; note = 2'-deoxy-2'-fluoroguanosine-3'-phosphate
  modified_base 7: mod_base = OTHER; note = 2'-O-methyladenosine-3'-phosphate
  modified_base 8: mod_base = OTHER; note = 2'-deoxy-2'-fluoroguanosine-3'-phosphate
  modified_base 9: mod_base = OTHER; note = 2'-O-methylcytidine-3'-phosphate
  modified_base 10: mod_base = OTHER; note = 2'-deoxy-2'-fluoroadenosine-3'-phosphate
  modified_base 11: mod_base = OTHER; note = 2'-O-methyladenosine-3'-phosphate
  modified_base 12: mod_base = OTHER; note = 2'-O-methylguanosine-3'-phosphate
  modified_base 13: mod_base = OTHER; note = 2'-O-methyladenosine-3'-phosphate
  modified_base 14: mod_base = OTHER; note = 2'-deoxy-2'-fluoroadenosine-3'-phosphate
  modified_base 15: mod_base = OTHER; note = 2'-O-methylcytidine-3'-phosphate
  modified_base 16: mod_base = OTHER; note = 1-deoxy-1-(adenin-9-yl)-alpha-L-threofuranose 2-phosphate
  modified_base 17: mod_base = OTHER; note = 2'-O-methylcytidine-3'-phosphate
  modified_base 18: mod_base = OTHER; note = 2'-deoxy-2'-fluorouridine-3'-phosphate
  modified_base 19: mod_base = OTHER; note = 2'-O-methylguanosine-3'-phosphate
  modified_base 20: mod_base = OTHER; note = 2'-deoxy-2'-fluorouridine-3'-phosphate
  modified_base 21: mod_base = OTHER; note = 2'-O-methyluridine-3'-phosphorothioate
  modified_base 22: mod_base = OTHER; note = 2'-O-methyluridine-3'-phosphorothioate
  modified_base 23: mod_base = OTHER; note = 2'-O-methyluridine
ttatagagcaagaacactgtttt

SEQ ID NO: 600 - RNA, 23 nt, synthetic construct
  source 1..23: mol_type = other RNA
  modified_base 1: mod_base = OTHER; note = 2'-O-methyluridine-3'-phosphorothioate
  modified_base 2: mod_base = OTHER; note = 2'-deoxy-2'-fluorouridine-3'-phosphorothioate
  modified_base 3: mod_base = OTHER; note = 2'-O-methyladenosine-3'-phosphate
  modified_base 4: mod_base = OTHER; note = 2'-deoxy-2'-fluorouridine-3'-phosphate
  modified_base 5: mod_base = OTHER; note = 2'-O-methyladenosine-3'-phosphate
  modified_base 6: mod_base = OTHER; note = 2'-deoxy-2'-fluoroguanosine-3'-phosphate
  modified_base 7: mod_base = OTHER; note = 2'-O-methyladenosine-3'-phosphate
  modified_base 8: mod_base = OTHER; note = 2'-deoxy-2'-fluoroguanosine-3'-phosphate
  modified_base 9: mod_base = OTHER; note = 2'-O-methylcytidine-3'-phosphate
  modified_base 10: mod_base = OTHER; note = 2'-deoxy-2'-fluoroadenosine-3'-phosphate
  modified_base 11: mod_base = OTHER; note = 2'-O-methyladenosine-3'-phosphate
  modified_base 12: mod_base = OTHER; note = 2'-O-methylguanosine-3'-phosphate
  modified_base 13: mod_base = OTHER; note = 2'-O-methyladenosine-3'-phosphate
  modified_base 14: mod_base = OTHER; note = 2'-deoxy-2'-fluoroadenosine-3'-phosphate
  modified_base 15: mod_base = OTHER; note 1-deoxy-1-(5-methylcytosin-1-yl)-alpha-L-threofuranose 2-phosphate
  modified_base 16: mod_base = OTHER; note = 2'-deoxy-2'-fluoroadenosine-3'-phosphate
  modified_base 17: mod_base = OTHER; note = 2'-O-methylcytidine-3'-phosphate
  modified_base 18: mod_base = OTHER; note = 2'-deoxy-2'-fluorouridine-3'-phosphate
  modified_base 19: mod_base = OTHER; note = 2'-O-methylguanosine-3'-phosphate
  modified_base 20: mod_base = OTHER; note = 2'-deoxy-2'-fluorouridine-3'-phosphate
  modified_base 21: mod_base = OTHER; note = 2'-O-methyluridine-3'-phosphorothioate
  modified_base 22: mod_base = OTHER; note = 2'-O-methyluridine-3'-phosphorothioate
  modified_base 23: mod_base = OTHER; note = 2'-O-methyluridine
ttatagagcaagaacactgtttt

SEQ ID NO: 601 - RNA, 23 nt, synthetic construct
  source 1..23: mol_type = other RNA
  modified_base 1: mod_base = OTHER; note = 2'-O-methyluridine-3'-phosphorothioate
  modified_base 2: mod_base = OTHER; note = 2'-deoxy-2'-fluorouridine-3'-phosphorothioate
  modified_base 3: mod_base = OTHER; note = 2'-O-methyladenosine-3'-phosphate
  modified_base 4: mod_base = OTHER; note = 2'-deoxy-2'-fluorouridine-3'-phosphate
  modified_base 5: mod_base = OTHER; note = 2'-O-methyladenosine-3'-phosphate
  modified_base 6: mod_base = OTHER; note = 2'-deoxy-2'-fluoroguanosine-3'-phosphate
  modified_base 7: mod_base = OTHER; note = 2'-O-methyladenosine-3'-phosphate
  modified_base 8: mod_base = OTHER; note = 2'-deoxy-2'-fluoroguanosine-3'-phosphate
  modified_base 9: mod_base = OTHER; note = 2'-O-methylcytidine-3'-phosphate
  modified_base 10: mod_base = OTHER; note = 2'-deoxy-2'-fluoroadenosine-3'-phosphate
  modified_base 11: mod_base = OTHER; note = 2'-O-methyladenosine-3'-phosphate
  modified_base 12: mod_base = OTHER; note = 2'-O-methylguanosine-3'-phosphate
  modified_base 13: mod_base = OTHER; note = 2'-O-methyladenosine-3'-phosphate
  modified_base 14: mod_base = OTHER; note = 1-deoxy-1-(adenin-9-yl)-alpha-L-threofuranose 2-phosphate
  modified_base 15: mod_base = OTHER; note = 2'-O-methylcytidine-3'-phosphate
  modified_base 16: mod_base = OTHER; note = 2'-deoxy-2'-fluoroadenosine-3'-phosphate
  modified_base 17: mod_base = OTHER; note = 2'-O-methylcytidine-3'-phosphate
  modified_base 18: mod_base = OTHER; note = 2'-deoxy-2'-fluorouridine-3'-phosphate
  modified_base 19: mod_base = OTHER; note = 2'-O-methylguanosine-3'-phosphate
  modified_base 20: mod_base = OTHER; note = 2'-deoxy-2'-fluorouridine-3'-phosphate
  modified_base 21: mod_base = OTHER; note = 2'-O-methyluridine-3'-phosphorothioate
  modified_base 22: mod_base = OTHER; note = 2'-O-methyluridine-3'-phosphorothioate
  modified_base 23: mod_base = OTHER; note = 2'-O-methyluridine
ttatagagcaagaacactgtttt

SEQ ID NO: 602 - RNA, 23 nt, synthetic construct
  source 1..23: mol_type = other RNA
  modified_base 1: mod_base = OTHER; note = 2'-O-methyluridine-3'-phosphorothioate
  modified_base 2: mod_base = OTHER; note = 2'-deoxy-2'-fluorouridine-3'-phosphorothioate
  modified_base 3: mod_base = OTHER; note = 2'-O-methyladenosine-3'-phosphate
  modified_base 4: mod_base = OTHER; note = 2'-deoxy-2'-fluorouridine-3'-phosphate
  modified_base 5: mod_base = OTHER; note = 2'-O-methyladenosine-3'-phosphate
  modified_base 6: mod_base = OTHER; note = 2'-deoxy-2'-fluoroguanosine-3'-phosphate
  modified_base 7: mod_base = OTHER; note = 2'-O-methyladenosine-3'-phosphate
  modified_base 8: mod_base = OTHER; note = 2'-deoxy-2'-fluoroguanosine-3'-phosphate
  modified_base 9: mod_base = OTHER; note = 2'-O-methylcytidine-3'-phosphate
  modified_base 10: mod_base = OTHER; note = 2'-deoxy-2'-fluoroadenosine-3'-phosphate
  modified_base 11: mod_base = OTHER; note = 2'-O-methyladenosine-3'-phosphate
  modified_base 12: mod_base = OTHER; note = 2'-O-methylguanosine-3'-phosphate
  modified_base 13: mod_base = OTHER; note = 1-deoxy-1-(adenin-9-yl)-alpha-L-threofuranose 2-phosphate
  modified_base 14: mod_base = OTHER; note = 2'-deoxy-2'-fluoroadenosine-3'-phosphate
  modified_base 15: mod_base = OTHER; note = 2'-O-methylcytidine-3'-phosphate
  modified_base 16: mod_base = OTHER; note = 2'-deoxy-2'-fluoroadenosine-3'-phosphate
  modified_base 17: mod_base = OTHER; note = 2'-O-methylcytidine-3'-phosphate
  modified_base 18: mod_base = OTHER; note = 2'-deoxy-2'-fluorouridine-3'-phosphate
  modified_base 19: mod_base = OTHER; note = 2'-O-methylguanosine-3'-phosphate
  modified_base 20: mod_base = OTHER; note = 2'-deoxy-2'-fluorouridine-3'-phosphate
  modified_base 21: mod_base = OTHER; note = 2'-O-methyluridine-3'-phosphorothioate
  modified_base 22: mod_base = OTHER; note = 2'-O-methyluridine-3'-phosphorothioate
  modified_base 23: mod_base = OTHER; note = 2'-O-methyluridine
ttatagagcaagaacactgtttt

SEQ ID NO: 603 - RNA, 23 nt, synthetic construct
  source 1..23: mol_type = other RNA
  modified_base 1: mod_base = OTHER; note = 2'-O-methyluridine-3'-phosphorothioate
  modified_base 2: mod_base = OTHER; note = 2'-deoxy-2'-fluorouridine-3'-phosphorothioate
  modified_base 3: mod_base = OTHER; note = 2'-O-methyladenosine-3'-phosphate
  modified_base 4: mod_base = OTHER; note = 2'-deoxy-2'-fluorouridine-3'-phosphate
  modified_base 5: mod_base = OTHER; note = 2'-O-methyladenosine-3'-phosphate
  modified_base 6: mod_base = OTHER; note = 2'-deoxy-2'-fluoroguanosine-3'-phosphate
  modified_base 7: mod_base = OTHER; note = 2'-O-methyladenosine-3'-phosphate
  modified_base 8: mod_base = OTHER; note = 2'-deoxy-2'-fluoroguanosine-3'-phosphate
  modified_base 9: mod_base = OTHER; note = 2'-O-methylcytidine-3'-phosphate
  modified_base 10: mod_base = OTHER; note = 2'-deoxy-2'-fluoroadenosine-3'-phosphate
  modified_base 11: mod_base = OTHER; note = 2'-O-methyladenosine-3'-phosphate
  modified_base 12: mod_base = OTHER; note = 1-deoxy-1-(guanin-9-yl)-alpha-L-threofuranose 2-phosphate
  modified_base 13: mod_base = OTHER; note = 2'-O-methyladenosine-3'-phosphate
  modified_base 14: mod_base = OTHER; note = 2'-deoxy-2'-fluoroadenosine-3'-phosphate
  modified_base 15: mod_base = OTHER; note = 2'-O-methylcytidine-3'-phosphate
  modified_base 16: mod_base = OTHER; note = 2'-deoxy-2'-fluoroadenosine-3'-phosphate
  modified_base 17: mod_base = OTHER; note = 2'-O-methylcytidine-3'-phosphate
  modified_base 18: mod_base = OTHER; note = 2'-deoxy-2'-fluorouridine-3'-phosphate
  modified_base 19: mod_base = OTHER; note = 2'-O-methylguanosine-3'-phosphate
  modified_base 20: mod_base = OTHER; note = 2'-deoxy-2'-fluorouridine-3'-phosphate
  modified_base 21: mod_base = OTHER; note = 2'-O-methyluridine-3'-phosphorothioate
  modified_base 22: mod_base = OTHER; note = 2'-O-methyluridine-3'-phosphorothioate
  modified_base 23: mod_base = OTHER; note = 2'-O-methyluridine
ttatagagcaagaacactgtttt

SEQ ID NO: 604 - RNA, 23 nt, synthetic construct
  source 1..23: mol_type = other RNA
  modified_base 1: mod_base = OTHER; note = 2'-O-methyluridine-3'-phosphorothioate
  modified_base 2: mod_base = OTHER; note = 2'-deoxy-2'-fluorouridine-3'-phosphorothioate
  modified_base 3: mod_base = OTHER; note = 2'-O-methyladenosine-3'-phosphate
  modified_base 4: mod_base = OTHER; note = 2'-deoxy-2'-fluorouridine-3'-phosphate
  modified_base 5: mod_base = OTHER; note = 2'-O-methyladenosine-3'-phosphate
  modified_base 6: mod_base = OTHER; note = 2'-deoxy-2'-fluoroguanosine-3'-phosphate
  modified_base 7: mod_base = OTHER; note = 2'-O-methyladenosine-3'-phosphate
  modified_base 8: mod_base = OTHER; note = 2'-deoxy-2'-fluoroguanosine-3'-phosphate
  modified_base 9: mod_base = OTHER; note = 2'-O-methylcytidine-3'-phosphate
  modified_base 10: mod_base = OTHER; note = 2'-deoxy-2'-fluoroadenosine-3'-phosphate
  modified_base 11: mod_base = OTHER; note = 1-deoxy-1-(adenin-9-yl)-alpha-L-threofuranose 2-phosphate
  modified_base 12: mod_base = OTHER; note = 2'-O-methylguanosine-3'-phosphate
  modified_base 13: mod_base = OTHER; note = 2'-O-methyladenosine-3'-phosphate
  modified_base 14: mod_base = OTHER; note = 2'-deoxy-2'-fluoroadenosine-3'-phosphate
  modified_base 15: mod_base = OTHER; note = 2'-O-methylcytidine-3'-phosphate
  modified_base 16: mod_base = OTHER; note = 2'-deoxy-2'-fluoroadenosine-3'-phosphate
  modified_base 17: mod_base = OTHER; note = 2'-O-methylcytidine-3'-phosphate
  modified_base 18: mod_base = OTHER; note = 2'-deoxy-2'-fluorouridine-3'-phosphate
  modified_base 19: mod_base = OTHER; note = 2'-O-methylguanosine-3'-phosphate
  modified_base 20: mod_base = OTHER; note = 2'-deoxy-2'-fluorouridine-3'-phosphate
  modified_base 21: mod_base = OTHER; note = 2'-O-methyluridine-3'-phosphorothioate
  modified_base 22: mod_base = OTHER; note = 2'-O-methyluridine-3'-phosphorothioate
  modified_base 23: mod_base = OTHER; note = 2'-O-methyluridine
ttatagagcaagaacactgtttt

SEQ ID NO: 605 - RNA, 23 nt, synthetic construct
  source 1..23: mol_type = other RNA
  modified_base 1: mod_base = OTHER; note = 2'-O-methyluridine-3'-phosphorothioate
  modified_base 2: mod_base = OTHER; note = 2'-deoxy-2'-fluorouridine-3'-phosphorothioate
  modified_base 3: mod_base = OTHER; note = 2'-O-methyladenosine-3'-phosphate
  modified_base 4: mod_base = OTHER; note = 2'-deoxy-2'-fluorouridine-3'-phosphate
  modified_base 5: mod_base = OTHER; note = 2'-O-methyladenosine-3'-phosphate
  modified_base 6: mod_base = OTHER; note = 2'-deoxy-2'-fluoroguanosine-3'-phosphate
  modified_base 7: mod_base = OTHER; note = 2'-O-methyladenosine-3'-phosphate
  modified_base 8: mod_base = OTHER; note = 2'-deoxy-2'-fluoroguanosine-3'-phosphate
  modified_base 9: mod_base = OTHER; note = 2'-O-methylcytidine-3'-phosphate
  modified_base 10: mod_base = OTHER; note = 1-deoxy-1-(adenin-9-yl)-alpha-L-threofuranose 2-phosphate
  modified_base 11: mod_base = OTHER; note = 2'-O-methyladenosine-3'-phosphate
  modified_base 12: mod_base = OTHER; note = 2'-O-methylguanosine-3'-phosphate
  modified_base 13: mod_base = OTHER; note = 2'-O-methyladenosine-3'-phosphate
  modified_base 14: mod_base = OTHER; note = 2'-deoxy-2'-fluoroadenosine-3'-phosphate
  modified_base 15: mod_base = OTHER; note = 2'-O-methylcytidine-3'-phosphate
  modified_base 16: mod_base = OTHER; note = 2'-deoxy-2'-fluoroadenosine-3'-phosphate
  modified_base 17: mod_base = OTHER; note = 2'-O-methylcytidine-3'-phosphate
  modified_base 18: mod_base = OTHER; note = 2'-deoxy-2'-fluorouridine-3'-phosphate
  modified_base 19: mod_base = OTHER; note = 2'-O-methylguanosine-3'-phosphate
  modified_base 20: mod_base = OTHER; note = 2'-deoxy-2'-fluorouridine-3'-phosphate
  modified_base 21: mod_base = OTHER; note = 2'-O-methyluridine-3'-phosphorothioate
  modified_base 22: mod_base = OTHER; note = 2'-O-methyluridine-3'-phosphorothioate
  modified_base 23: mod_base = OTHER; note = 2'-O-methyluridine
ttatagagcaagaacactgtttt

SEQ ID NO: 606 - RNA, 23 nt, synthetic construct
  source 1..23: mol_type = other RNA
  modified_base 1: mod_base = OTHER; note = 2'-O-methyluridine-3'-phosphorothioate
  modified_base 2: mod_base = OTHER; note = 2'-deoxy-2'-fluorouridine-3'-phosphorothioate
  modified_base 3: mod_base = OTHER; note = 2'-O-methyladenosine-3'-phosphate
  modified_base 4: mod_base = OTHER; note = 2'-deoxy-2'-fluorouridine-3'-phosphate
  modified_base 5: mod_base = OTHER; note = 2'-O-methyladenosine-3'-phosphate
  modified_base 6: mod_base = OTHER; note = 2'-deoxy-2'-fluoroguanosine-3'-phosphate
  modified_base 7: mod_base = OTHER; note = 2'-O-methyladenosine-3'-phosphate
  modified_base 8: mod_base = OTHER; note = 2'-deoxy-2'-fluoroguanosine-3'-phosphate
  modified_base 9: mod_base = OTHER; note 1-deoxy-1-(5-methylcytosin-1-yl)-alpha-L-threofuranose 2-phosphate
  modified_base 10: mod_base = OTHER; note = 2'-deoxy-2'-fluoroadenosine-3'-phosphate
  modified_base 11: mod_base = OTHER; note = 2'-O-methyladenosine-3'-phosphate
  modified_base 12: mod_base = OTHER; note = 2'-O-methylguanosine-3'-phosphate
  modified_base 13: mod_base = OTHER; note = 2'-O-methyladenosine-3'-phosphate
  modified_base 14: mod_base = OTHER; note = 2'-deoxy-2'-fluoroadenosine-3'-phosphate
  modified_base 15: mod_base = OTHER; note = 2'-O-methylcytidine-3'-phosphate
  modified_base 16: mod_base = OTHER; note = 2'-deoxy-2'-fluoroadenosine-3'-phosphate
  modified_base 17: mod_base = OTHER; note = 2'-O-methylcytidine-3'-phosphate
  modified_base 18: mod_base = OTHER; note = 2'-deoxy-2'-fluorouridine-3'-phosphate
  modified_base 19: mod_base = OTHER; note = 2'-O-methylguanosine-3'-phosphate
  modified_base 20: mod_base = OTHER; note = 2'-deoxy-2'-fluorouridine-3'-phosphate
  modified_base 21: mod_base = OTHER; note = 2'-O-methyluridine-3'-phosphorothioate
  modified_base 22: mod_base = OTHER; note = 2'-O-methyluridine-3'-phosphorothioate
  modified_base 23: mod_base = OTHER; note = 2'-O-methyluridine
ttatagagcaagaacactgtttt

SEQ ID NO: 607 - RNA, 23 nt, synthetic construct
  source 1..23: mol_type = other RNA
  modified_base 1: mod_base = OTHER; note = 2'-O-methyluridine-3'-phosphorothioate
  modified_base 2: mod_base = OTHER; note = 2'-deoxy-2'-fluorouridine-3'-phosphorothioate
  modified_base 3: mod_base = OTHER; note = 2'-O-methyladenosine-3'-phosphate
  modified_base 4: mod_base = OTHER; note = 2'-deoxy-2'-fluorouridine-3'-phosphate
  modified_base 5: mod_base = OTHER; note = 2'-O-methyladenosine-3'-phosphate
  modified_base 6: mod_base = OTHER; note = 2'-deoxy-2'-fluoroguanosine-3'-phosphate
  modified_base 7: mod_base = OTHER; note = 2'-O-methyladenosine-3'-phosphate
  modified_base 8: mod_base = OTHER; note = 1-deoxy-1-(guanin-9-yl)-alpha-L-threofuranose 2-phosphate
  modified_base 9: mod_base = OTHER; note = 2'-O-methylcytidine-3'-phosphate
  modified_base 10: mod_base = OTHER; note = 2'-deoxy-2'-fluoroadenosine-3'-phosphate
  modified_base 11: mod_base = OTHER; note = 2'-O-methyladenosine-3'-phosphate
  modified_base 12: mod_base = OTHER; note = 2'-O-methylguanosine-3'-phosphate
  modified_base 13: mod_base = OTHER; note = 2'-O-methyladenosine-3'-phosphate
  modified_base 14: mod_base = OTHER; note = 2'-deoxy-2'-fluoroadenosine-3'-phosphate
  modified_base 15: mod_base = OTHER; note = 2'-O-methylcytidine-3'-phosphate
  modified_base 16: mod_base = OTHER; note = 2'-deoxy-2'-fluoroadenosine-3'-phosphate
  modified_base 17: mod_base = OTHER; note = 2'-O-methylcytidine-3'-phosphate
  modified_base 18: mod_base = OTHER; note = 2'-deoxy-2'-fluorouridine-3'-phosphate
  modified_base 19: mod_base = OTHER; note = 2'-O-methylguanosine-3'-phosphate
  modified_base 20: mod_base = OTHER; note = 2'-deoxy-2'-fluorouridine-3'-phosphate
  modified_base 21: mod_base = OTHER; note = 2'-O-methyluridine-3'-phosphorothioate
  modified_base 22: mod_base = OTHER; note = 2'-O-methyluridine-3'-phosphorothioate
  modified_base 23: mod_base = OTHER; note = 2'-O-methyluridine
ttatagagcaagaacactgtttt

SEQ ID NO: 608 - RNA, 23 nt, synthetic construct
  source 1..23: mol_type = other RNA
  modified_base 1: mod_base = OTHER; note = 2'-O-methyluridine-3'-phosphorothioate
  modified_base 2: mod_base = OTHER; note = 2'-deoxy-2'-fluorouridine-3'-phosphorothioate
  modified_base 3: mod_base = OTHER; note = 2'-O-methyladenosine-3'-phosphate
  modified_base 4: mod_base = OTHER; note = 2'-deoxy-2'-fluorouridine-3'-phosphate
  modified_base 5: mod_base = OTHER; note = 2'-O-methyladenosine-3'-phosphate
  modified_base 6: mod_base = OTHER; note = 2'-deoxy-2'-fluoroguanosine-3'-phosphate
  modified_base 7: mod_base = OTHER; note = 1-deoxy-1-(adenin-9-yl)-alpha-L-threofuranose 2-phosphate
  modified_base 8: mod_base = OTHER; note = 2'-deoxy-2'-fluoroguanosine-3'-phosphate
  modified_base 9: mod_base = OTHER; note = 2'-O-methylcytidine-3'-phosphate
  modified_base 10: mod_base = OTHER; note = 2'-deoxy-2'-fluoroadenosine-3'-phosphate
  modified_base 11: mod_base = OTHER; note = 2'-O-methyladenosine-3'-phosphate
  modified_base 12: mod_base = OTHER; note = 2'-O-methylguanosine-3'-phosphate
  modified_base 13: mod_base = OTHER; note = 2'-O-methyladenosine-3'-phosphate
  modified_base 14: mod_base = OTHER; note = 2'-deoxy-2'-fluoroadenosine-3'-phosphate
  modified_base 15: mod_base = OTHER; note = 2'-O-methylcytidine-3'-phosphate
  modified_base 16: mod_base = OTHER; note = 2'-deoxy-2'-fluoroadenosine-3'-phosphate
  modified_base 17: mod_base = OTHER; note = 2'-O-methylcytidine-3'-phosphate
  modified_base 18: mod_base = OTHER; note = 2'-deoxy-2'-fluorouridine-3'-phosphate
  modified_base 19: mod_base = OTHER; note = 2'-O-methylguanosine-3'-phosphate
  modified_base 20: mod_base = OTHER; note = 2'-deoxy-2'-fluorouridine-3'-phosphate
  modified_base 21: mod_base = OTHER; note = 2'-O-methyluridine-3'-phosphorothioate
  modified_base 22: mod_base = OTHER; note = 2'-O-methyluridine-3'-phosphorothioate
  modified_base 23: mod_base = OTHER; note = 2'-O-methyluridine
ttatagagcaagaacactgtttt

SEQ ID NO: 609 - RNA, 23 nt, synthetic construct
  source 1..23: mol_type = other RNA
  modified_base 1: mod_base = OTHER; note = 2'-O-methyluridine-3'-phosphorothioate
  modified_base 2: mod_base = OTHER; note = 2'-deoxy-2'-fluorouridine-3'-phosphorothioate
  modified_base 3: mod_base = OTHER; note = 2'-O-methyladenosine-3'-phosphate
  modified_base 4: mod_base = OTHER; note = 2'-deoxy-2'-fluorouridine-3'-phosphate
  modified_base 5: mod_base = OTHER; note = 2'-O-methyladenosine-3'-phosphate
  modified_base 6: mod_base = OTHER; note = 1-deoxy-1-(guanin-9-yl)-alpha-L-threofuranose 2-phosphate
  modified_base 7: mod_base = OTHER; note = 2'-O-methyladenosine-3'-phosphate
  modified_base 8: mod_base = OTHER; note = 2'-deoxy-2'-fluoroguanosine-3'-phosphate
  modified_base 9: mod_base = OTHER; note = 2'-O-methylcytidine-3'-phosphate
  modified_base 10: mod_base = OTHER; note = 2'-deoxy-2'-fluoroadenosine-3'-phosphate
  modified_base 11: mod_base = OTHER; note = 2'-O-methyladenosine-3'-phosphate
  modified_base 12: mod_base = OTHER; note = 2'-O-methylguanosine-3'-phosphate
  modified_base 13: mod_base = OTHER; note = 2'-O-methyladenosine-3'-phosphate
  modified_base 14: mod_base = OTHER; note = 2'-deoxy-2'-fluoroadenosine-3'-phosphate
  modified_base 15: mod_base = OTHER; note = 2'-O-methylcytidine-3'-phosphate
  modified_base 16: mod_base = OTHER; note = 2'-deoxy-2'-fluoroadenosine-3'-phosphate
  modified_base 17: mod_base = OTHER; note = 2'-O-methylcytidine-3'-phosphate
  modified_base 18: mod_base = OTHER; note = 2'-deoxy-2'-fluorouridine-3'-phosphate
  modified_base 19: mod_base = OTHER; note = 2'-O-methylguanosine-3'-phosphate
  modified_base 20: mod_base = OTHER; note = 2'-deoxy-2'-fluorouridine-3'-phosphate
  modified_base 21: mod_base = OTHER; note = 2'-O-methyluridine-3'-phosphorothioate
  modified_base 22: mod_base = OTHER; note = 2'-O-methyluridine-3'-phosphorothioate
  modified_base 23: mod_base = OTHER; note = 2'-O-methyluridine
ttatagagcaagaacactgtttt

SEQ ID NO: 610 - RNA, 23 nt, synthetic construct
  source 1..23: mol_type = other RNA
  modified_base 1: mod_base = OTHER; note = 2'-O-methyluridine-3'-phosphorothioate
  modified_base 2: mod_base = OTHER; note = 2'-deoxy-2'-fluorouridine-3'-phosphorothioate
  modified_base 3: mod_base = OTHER; note = 2'-O-methyladenosine-3'-phosphate
  modified_base 4: mod_base = OTHER; note = 2'-deoxy-2'-fluorouridine-3'-phosphate
  modified_base 5: mod_base = OTHER; note = 1-deoxy-1-(adenin-9-yl)-alpha-L-threofuranose 2-phosphate
  modified_base 6: mod_base = OTHER; note = 2'-deoxy-2'-fluoroguanosine-3'-phosphate
  modified_base 7: mod_base = OTHER; note = 2'-O-methyladenosine-3'-phosphate
  modified_base 8: mod_base = OTHER; note = 2'-deoxy-2'-fluoroguanosine-3'-phosphate
  modified_base 9: mod_base = OTHER; note = 2'-O-methylcytidine-3'-phosphate
  modified_base 10: mod_base = OTHER; note = 2'-deoxy-2'-fluoroadenosine-3'-phosphate
  modified_base 11: mod_base = OTHER; note = 2'-O-methyladenosine-3'-phosphate
  modified_base 12: mod_base = OTHER; note = 2'-O-methylguanosine-3'-phosphate
  modified_base 13: mod_base = OTHER; note = 2'-O-methyladenosine-3'-phosphate
  modified_base 14: mod_base = OTHER; note = 2'-deoxy-2'-fluoroadenosine-3'-phosphate
  modified_base 15: mod_base = OTHER; note = 2'-O-methylcytidine-3'-phosphate
  modified_base 16: mod_base = OTHER; note = 2'-deoxy-2'-fluoroadenosine-3'-phosphate
  modified_base 17: mod_base = OTHER; note = 2'-O-methylcytidine-3'-phosphate
  modified_base 18: mod_base = OTHER; note = 2'-deoxy-2'-fluorouridine-3'-phosphate
  modified_base 19: mod_base = OTHER; note = 2'-O-methylguanosine-3'-phosphate
  modified_base 20: mod_base = OTHER; note = 2'-deoxy-2'-fluorouridine-3'-phosphate
  modified_base 21: mod_base = OTHER; note = 2'-O-methyluridine-3'-phosphorothioate
  modified_base 22: mod_base = OTHER; note = 2'-O-methyluridine-3'-phosphorothioate
  modified_base 23: mod_base = OTHER; note = 2'-O-methyluridine
ttatagagcaagaacactgtttt

SEQ ID NO: 611 - RNA, 23 nt, synthetic construct
  source 1..23: mol_type = other RNA
  modified_base 1: mod_base = OTHER; note = 2'-O-methyluridine-3'-phosphorothioate
  modified_base 2: mod_base = OTHER; note = 2'-deoxy-2'-fluorouridine-3'-phosphorothioate
  modified_base 3: mod_base = OTHER; note = 2'-O-methyladenosine-3'-phosphate
  modified_base 4: mod_base = OTHER; note = 1-deoxy-1-(thymin-1-yl)-alpha-L-threofuranose 2-phosphate
  modified_base 5: mod_base = OTHER; note = 2'-O-methyladenosine-3'-phosphate
  modified_base 6: mod_base = OTHER; note = 2'-deoxy-2'-fluoroguanosine-3'-phosphate
  modified_base 7: mod_base = OTHER; note = 2'-O-methyladenosine-3'-phosphate
  modified_base 8: mod_base = OTHER; note = 2'-deoxy-2'-fluoroguanosine-3'-phosphate
  modified_base 9: mod_base = OTHER; note = 2'-O-methylcytidine-3'-phosphate
  modified_base 10: mod_base = OTHER; note = 2'-deoxy-2'-fluoroadenosine-3'-phosphate
  modified_base 11: mod_base = OTHER; note = 2'-O-methyladenosine-3'-phosphate
  modified_base 12: mod_base = OTHER; note = 2'-O-methylguanosine-3'-phosphate
  modified_base 13: mod_base = OTHER; note = 2'-O-methyladenosine-3'-phosphate
  modified_base 14: mod_base = OTHER; note = 2'-deoxy-2'-fluoroadenosine-3'-phosphate
  modified_base 15: mod_base = OTHER; note = 2'-O-methylcytidine-3'-phosphate
  modified_base 16: mod_base = OTHER; note = 2'-deoxy-2'-fluoroadenosine-3'-phosphate
  modified_base 17: mod_base = OTHER; note = 2'-O-methylcytidine-3'-phosphate
  modified_base 18: mod_base = OTHER; note = 2'-deoxy-2'-fluorouridine-3'-phosphate
  modified_base 19: mod_base = OTHER; note = 2'-O-methylguanosine-3'-phosphate
  modified_base 20: mod_base = OTHER; note = 2'-deoxy-2'-fluorouridine-3'-phosphate
  modified_base 21: mod_base = OTHER; note = 2'-O-methyluridine-3'-phosphorothioate
  modified_base 22: mod_base = OTHER; note = 2'-O-methyluridine-3'-phosphorothioate
  modified_base 23: mod_base = OTHER; note = 2'-O-methyluridine
ttatagagcaagaacactgtttt

SEQ ID NO: 612 - RNA, 23 nt, synthetic construct
  source 1..23: mol_type = other RNA
  modified_base 1: mod_base = OTHER; note = 2'-O-methyluridine-3'-phosphorothioate
  modified_base 2: mod_base = OTHER; note = 2'-deoxy-2'-fluorouridine-3'-phosphorothioate
  modified_base 3: mod_base = OTHER; note = 1-deoxy-1-(adenin-9-yl)-alpha-L-threofuranose 2-phosphate
  modified_base 4: mod_base = OTHER; note = 2'-deoxy-2'-fluorouridine-3'-phosphate
  modified_base 5: mod_base = OTHER; note = 2'-O-methyladenosine-3'-phosphate
  modified_base 6: mod_base = OTHER; note = 2'-deoxy-2'-fluoroguanosine-3'-phosphate
  modified_base 7: mod_base = OTHER; note = 2'-O-methyladenosine-3'-phosphate
  modified_base 8: mod_base = OTHER; note = 2'-deoxy-2'-fluoroguanosine-3'-phosphate
  modified_base 9: mod_base = OTHER; note = 2'-O-methylcytidine-3'-phosphate
  modified_base 10: mod_base = OTHER; note = 2'-deoxy-2'-fluoroadenosine-3'-phosphate
  modified_base 11: mod_base = OTHER; note = 2'-O-methyladenosine-3'-phosphate
  modified_base 12: mod_base = OTHER; note = 2'-O-methylguanosine-3'-phosphate
  modified_base 13: mod_base = OTHER; note = 2'-O-methyladenosine-3'-phosphate
  modified_base 14: mod_base = OTHER; note = 2'-deoxy-2'-fluoroadenosine-3'-phosphate
  modified_base 15: mod_base = OTHER; note = 2'-O-methylcytidine-3'-phosphate
  modified_base 16: mod_base = OTHER; note = 2'-deoxy-2'-fluoroadenosine-3'-phosphate
  modified_base 17: mod_base = OTHER; note = 2'-O-methylcytidine-3'-phosphate
  modified_base 18: mod_base = OTHER; note = 2'-deoxy-2'-fluorouridine-3'-phosphate
  modified_base 19: mod_base = OTHER; note = 2'-O-methylguanosine-3'-phosphate
  modified_base 20: mod_base = OTHER; note = 2'-deoxy-2'-fluorouridine-3'-phosphate
  modified_base 21: mod_base = OTHER; note = 2'-O-methyluridine-3'-phosphorothioate
  modified_base 22: mod_base = OTHER; note = 2'-O-methyluridine-3'-phosphorothioate
  modified_base 23: mod_base = OTHER; note = 2'-O-methyluridine
ttatagagcaagaacactgtttt

SEQ ID NO: 613 - RNA, 23 nt, synthetic construct
  source 1..23: mol_type = other RNA
  modified_base 1: mod_base = OTHER; note = 2'-O-methyluridine-3'-phosphorothioate
  modified_base 2: mod_base = OTHER; note = 1-deoxy-1-(thymin-1-yl)-alpha-L-threofuranose 2-phosphorothioate
  modified_base 3: mod_base = OTHER; note = 2'-O-methyladenosine-3'-phosphate
  modified_base 4: mod_base = OTHER; note = 2'-deoxy-2'-fluorouridine-3'-phosphate
  modified_base 5: mod_base = OTHER; note = 2'-O-methyladenosine-3'-phosphate
  modified_base 6: mod_base = OTHER; note = 2'-deoxy-2'-fluoroguanosine-3'-phosphate
  modified_base 7: mod_base = OTHER; note = 2'-O-methyladenosine-3'-phosphate
  modified_base 8: mod_base = OTHER; note = 2'-deoxy-2'-fluoroguanosine-3'-phosphate
  modified_base 9: mod_base = OTHER; note = 2'-O-methylcytidine-3'-phosphate
  modified_base 10: mod_base = OTHER; note = 2'-deoxy-2'-fluoroadenosine-3'-phosphate
  modified_base 11: mod_base = OTHER; note = 2'-O-methyladenosine-3'-phosphate
  modified_base 12: mod_base = OTHER; note = 2'-O-methylguanosine-3'-phosphate
  modified_base 13: mod_base = OTHER; note = 2'-O-methyladenosine-3'-phosphate
  modified_base 14: mod_base = OTHER; note = 2'-deoxy-2'-fluoroadenosine-3'-phosphate
  modified_base 15: mod_base = OTHER; note = 2'-O-methylcytidine-3'-phosphate
  modified_base 16: mod_base = OTHER; note = 2'-deoxy-2'-fluoroadenosine-3'-phosphate
  modified_base 17: mod_base = OTHER; note = 2'-O-methylcytidine-3'-phosphate
  modified_base 18: mod_base = OTHER; note = 2'-deoxy-2'-fluorouridine-3'-phosphate
  modified_base 19: mod_base = OTHER; note = 2'-O-methylguanosine-3'-phosphate
  modified_base 20: mod_base = OTHER; note = 2'-deoxy-2'-fluorouridine-3'-phosphate
  modified_base 21: mod_base = OTHER; note = 2'-O-methyluridine-3'-phosphorothioate
  modified_base 22: mod_base = OTHER; note = 2'-O-methyluridine-3'-phosphorothioate
  modified_base 23: mod_base = OTHER; note = 2'-O-methyluridine
ttatagagcaagaacactgtttt

SEQ ID NO: 614 - RNA, 23 nt, synthetic construct
  source 1..23: mol_type = other RNA
  modified_base 1: mod_base = OTHER; note = 1-deoxy-1-(thymin-1-yl)-alpha-L-threofuranose 2-phosphorothioate
  modified_base 2: mod_base = OTHER; note = 2'-deoxy-2'-fluorouridine-3'-phosphorothioate
  modified_base 3: mod_base = OTHER; note = 2'-O-methyladenosine-3'-phosphate
  modified_base 4: mod_base = OTHER; note = 2'-deoxy-2'-fluorouridine-3'-phosphate
  modified_base 5: mod_base = OTHER; note = 2'-O-methyladenosine-3'-phosphate
  modified_base 6: mod_base = OTHER; note = 2'-deoxy-2'-fluoroguanosine-3'-phosphate
  modified_base 7: mod_base = OTHER; note = 2'-O-methyladenosine-3'-phosphate
  modified_base 8: mod_base = OTHER; note = 2'-deoxy-2'-fluoroguanosine-3'-phosphate
  modified_base 9: mod_base = OTHER; note = 2'-O-methylcytidine-3'-phosphate
  modified_base 10: mod_base = OTHER; note = 2'-deoxy-2'-fluoroadenosine-3'-phosphate
  modified_base 11: mod_base = OTHER; note = 2'-O-methyladenosine-3'-phosphate
  modified_base 12: mod_base = OTHER; note = 2'-O-methylguanosine-3'-phosphate
  modified_base 13: mod_base = OTHER; note = 2'-O-methyladenosine-3'-phosphate
  modified_base 14: mod_base = OTHER; note = 2'-deoxy-2'-fluoroadenosine-3'-phosphate
  modified_base 15: mod_base = OTHER; note = 2'-O-methylcytidine-3'-phosphate
  modified_base 16: mod_base = OTHER; note = 2'-deoxy-2'-fluoroadenosine-3'-phosphate
  modified_base 17: mod_base = OTHER; note = 2'-O-methylcytidine-3'-phosphate
  modified_base 18: mod_base = OTHER; note = 2'-deoxy-2'-fluorouridine-3'-phosphate
  modified_base 19: mod_base = OTHER; note = 2'-O-methylguanosine-3'-phosphate
  modified_base 20: mod_base = OTHER; note = 2'-deoxy-2'-fluorouridine-3'-phosphate
  modified_base 21: mod_base = OTHER; note = 2'-O-methyluridine-3'-phosphorothioate
  modified_base 22: mod_base = OTHER; note = 2'-O-methyluridine-3'-phosphorothioate
  modified_base 23: mod_base = OTHER; note = 2'-O-methyluridine
ttatagagcaagaacactgtttt

SEQ ID NO: 615 - RNA, 21 nt, synthetic construct
  source 1..21: mol_type = other RNA
  modified_base 1: mod_base = OTHER; note = 2'-O-methyladenosine-3'-phosphorothioate
  modified_base 2: mod_base = OTHER; note = 2'-O-methyladenosine-3'-phosphorothioate
  modified_base 3: mod_base = OTHER; note = 2'-O-methylcytidine-3'-phosphate
  modified_base 4: mod_base = OTHER; note = 2'-O-methyladenosine-3'-phosphate
  modified_base 5: mod_base = OTHER; note = 2'-O-methylguanosine-3'-phosphate
  modified_base 6: mod_base = OTHER; note = 2'-O-methyluridine-3'-phosphate
  modified_base 7: mod_base = OTHER; note = 2'-deoxy-2'-fluoroguanosine-3'-phosphate
  modified_base 8: mod_base = OTHER; note = 2'-O-methyluridine-3'-phosphate
  modified_base 9: mod_base = OTHER; note = 2'-deoxy-2'-fluorouridine-3'-phosphate
  modified_base 10: mod_base = OTHER; note = 2'-deoxy-2'-fluorocytidine-3'-phosphate
  modified_base 11: mod_base = OTHER; note = 2'-deoxy-2'-fluorouridine-3'-phosphate
  modified_base 12: mod_base = OTHER; note = 2'-O-methyluridine-3'-phosphate
  modified_base 13: mod_base = OTHER; note = 2'-O-methylguanosine-3'-phosphate
  modified_base 14: mod_base = OTHER; note = 2'-O-methylcytidine-3'-phosphate
  modified_base 15: mod_base = OTHER; note = 2'-O-methyluridine-3'-phosphate
  modified_base 16: mod_base = OTHER; note = 2'-O-methylcytidine-3'-phosphate
  modified_base 17: mod_base = OTHER; note = 2'-O-methyluridine-3'-phosphate
  modified_base 18: mod_base = OTHER; note = 2'-O-methyladenosine-3'-phosphate
  modified_base 19: mod_base = OTHER; note = 2'-O-methyluridine-3'-phosphate
  modified_base 20: mod_base = OTHER; note = 2'-O-methyladenosine-3'-phosphate
  modified_base 21: mod_base = OTHER; note = 2'-O-methyladenosine-3'-phosphate conjugated at the 3'-end to an L96 ligand
aacagtgttcttgctctataa

SEQ ID NO: 616 - RNA, 21 nt, synthetic construct
  source 1..21: mol_type = other RNA
  modified_base 1: mod_base = OTHER; note = 2'-O-methyladenosine-3'-phosphorothioate
  modified_base 2: mod_base = OTHER; note = 2'-O-methyladenosine-3'-phosphorothioate
  modified_base 3: mod_base = OTHER; note = 2'-O-methylcytidine-3'-phosphate
  modified_base 4: mod_base = OTHER; note = 2'-O-methyladenosine-3'-phosphate
  modified_base 5: mod_base = OTHER; note = 2'-O-methylguanosine-3'-phosphate
  modified_base 6: mod_base = OTHER; note = 2'-O-methyluridine-3'-phosphate
  modified_base 7: mod_base = OTHER; note = 2'-deoxy-2'-fluoroguanosine-3'-phosphate
  modified_base 8: mod_base = OTHER; note = 2'-O-methyluridine-3'-phosphate
  modified_base 9: mod_base = OTHER; note = 2'-deoxy-2'-fluorouridine-3'-phosphate
  modified_base 10: mod_base = OTHER; note = 2'-deoxy-2'-fluorocytidine-3'-phosphate
  modified_base 11: mod_base = OTHER; note = 2'-deoxy-2'-fluorouridine-3'-phosphate
  modified_base 12: mod_base = OTHER; note = 2'-O-methyluridine-3'-phosphate
  modified_base 13: mod_base = OTHER; note = 2'-O-methylguanosine-3'-phosphate
  modified_base 14: mod_base = OTHER; note = 2'-O-methylcytidine-3'-phosphate
  modified_base 15: mod_base = OTHER; note = 2'-O-methyluridine-3'-phosphate
  modified_base 16: mod_base = OTHER; note = 2'-O-methylcytidine-3'-phosphate
  modified_base 17: mod_base = OTHER; note = 2'-O-methyluridine-3'-phosphate
  modified_base 18: mod_base = OTHER; note = 2'-O-methyladenosine-3'-phosphate
  modified_base 19: mod_base = OTHER; note = 2'-O-methyluridine-3'-phosphate
  modified_base 20: mod_base = OTHER; note = 2'-O-methyladenosine-3'-phosphate
  modified_base 21: mod_base = OTHER; note = 2'-O-methyladenosine-3'-phosphate conjugated at the 3'-end to an L96 ligand
aacagtgttcttgctctataa

SEQ ID NO: 617 - RNA, 21 nt, synthetic construct
  source 1..21: mol_type = other RNA
  modified_base 1: mod_base = OTHER; note = 2'-O-methyladenosine-3'-phosphorothioate
  modified_base 2: mod_base = OTHER; note = 2'-O-methyladenosine-3'-phosphorothioate
  modified_base 3: mod_base = OTHER; note = 2'-O-methylcytidine-3'-phosphate
  modified_base 4: mod_base = OTHER; note = 2'-O-methyladenosine-3'-phosphate
  modified_base 5: mod_base = OTHER; note = 2'-O-methylguanosine-3'-phosphate
  modified_base 6: mod_base = OTHER; note = 2'-O-methyluridine-3'-phosphate
  modified_base 7: mod_base = OTHER; note = 2'-deoxy-2'-fluoroguanosine-3'-phosphate
  modified_base 8: mod_base = OTHER; note = 2'-O-methyluridine-3'-phosphate
  modified_base 9: mod_base = OTHER; note = 2'-deoxy-2'-fluorouridine-3'-phosphate
  modified_base 10: mod_base = OTHER; note = 2'-deoxy-2'-fluorocytidine-3'-phosphate
  modified_base 11: mod_base = OTHER; note = 2'-deoxy-2'-fluorouridine-3'-phosphate
  modified_base 12: mod_base = OTHER; note = 2'-O-methyluridine-3'-phosphate
  modified_base 13: mod_base = OTHER; note = 2'-O-methylguanosine-3'-phosphate
  modified_base 14: mod_base = OTHER; note = 2'-O-methylcytidine-3'-phosphate
  modified_base 15: mod_base = OTHER; note = 2'-O-methyluridine-3'-phosphate
  modified_base 16: mod_base = OTHER; note = 2'-O-methylcytidine-3'-phosphate
  modified_base 17: mod_base = OTHER; note = 2'-O-methyluridine-3'-phosphate
  modified_base 18: mod_base = OTHER; note = 2'-O-methyladenosine-3'-phosphate
  modified_base 19: mod_base = OTHER; note = 2'-O-methyluridine-3'-phosphate
  modified_base 20: mod_base = OTHER; note = 2'-O-methyladenosine-3'-phosphate
  modified_base 21: mod_base = OTHER; note = 2'-O-methyladenosine-3'-phosphate conjugated at the 3'-end to an L96 ligand
aacagtgttcttgctctataa

SEQ ID NO: 618 - RNA, 21 nt, synthetic construct
  source 1..21: mol_type = other RNA
  modified_base 1: mod_base = OTHER; note = 2'-O-methyladenosine-3'-phosphorothioate
  modified_base 2: mod_base = OTHER; note = 2'-O-methyladenosine-3'-phosphorothioate
  modified_base 3: mod_base = OTHER; note = 2'-O-methylcytidine-3'-phosphate
  modified_base 4: mod_base = OTHER; note = 2'-O-methyladenosine-3'-phosphate
  modified_base 5: mod_base = OTHER; note = 2'-O-methylguanosine-3'-phosphate
  modified_base 6: mod_base = OTHER; note = 2'-O-methyluridine-3'-phosphate
  modified_base 7: mod_base = OTHER; note = 2'-deoxy-2'-fluoroguanosine-3'-phosphate
  modified_base 8: mod_base = OTHER; note = 2'-O-methyluridine-3'-phosphate
  modified_base 9: mod_base = OTHER; note = 2'-deoxy-2'-fluorouridine-3'-phosphate
  modified_base 10: mod_base = OTHER; note = 2'-deoxy-2'-fluorocytidine-3'-phosphate
  modified_base 11: mod_base = OTHER; note = 2'-deoxy-2'-fluorouridine-3'-phosphate
  modified_base 12: mod_base = OTHER; note = 2'-O-methyluridine-3'-phosphate
  modified_base 13: mod_base = OTHER; note = 2'-O-methylguanosine-3'-phosphate
  modified_base 14: mod_base = OTHER; note = 2'-O-methylcytidine-3'-phosphate
  modified_base 15: mod_base = OTHER; note = 2'-O-methyluridine-3'-phosphate
  modified_base 16: mod_base = OTHER; note = 2'-O-methylcytidine-3'-phosphate
  modified_base 17: mod_base = OTHER; note = 2'-O-methyluridine-3'-phosphate
  modified_base 18: mod_base = OTHER; note = 2'-O-methyladenosine-3'-phosphate
  modified_base 19: mod_base = OTHER; note = 2'-O-methyluridine-3'-phosphate
  modified_base 20: mod_base = OTHER; note = 2'-O-methyladenosine-3'-phosphate
  modified_base 21: mod_base = OTHER; note = 2'-O-methyladenosine-3'-phosphate conjugated at the 3'-end to an L96 ligand
aacagtgttcttgctctataa

SEQ ID NO: 619 - RNA, 21 nt, synthetic construct
  source 1..21: mol_type = other RNA
  modified_base 1: mod_base = OTHER; note = 2'-O-methyladenosine-3'-phosphorothioate
  modified_base 2: mod_base = OTHER; note = 2'-O-methyladenosine-3'-phosphorothioate
  modified_base 3: mod_base = OTHER; note = 2'-O-methylcytidine-3'-phosphate
  modified_base 4: mod_base = OTHER; note = 2'-O-methyladenosine-3'-phosphate
  modified_base 5: mod_base = OTHER; note = 2'-O-methylguanosine-3'-phosphate
  modified_base 6: mod_base = OTHER; note = 2'-O-methyluridine-3'-phosphate
  modified_base 7: mod_base = OTHER; note = 2'-deoxy-2'-fluoroguanosine-3'-phosphate
  modified_base 8: mod_base = OTHER; note = 2'-O-methyluridine-3'-phosphate
  modified_base 9: mod_base = OTHER; note = 2'-deoxy-2'-fluorouridine-3'-phosphate
  modified_base 10: mod_base = OTHER; note = 2'-deoxy-2'-fluorocytidine-3'-phosphate
  modified_base 11: mod_base = OTHER; note = 2'-deoxy-2'-fluorouridine-3'-phosphate
  modified_base 12: mod_base = OTHER; note = 2'-O-methyluridine-3'-phosphate
  modified_base 13: mod_base = OTHER; note = 2'-O-methylguanosine-3'-phosphate
  modified_base 14: mod_base = OTHER; note = 2'-O-methylcytidine-3'-phosphate
  modified_base 15: mod_base = OTHER; note = 2'-O-methyluridine-3'-phosphate
  modified_base 16: mod_base = OTHER; note = 2'-O-methylcytidine-3'-phosphate
  modified_base 17: mod_base = OTHER; note = 2'-O-methyluridine-3'-phosphate
  modified_base 18: mod_base = OTHER; note = 2'-O-methyladenosine-3'-phosphate
  modified_base 19: mod_base = OTHER; note = 2'-O-methyluridine-3'-phosphate
  modified_base 20: mod_base = OTHER; note = 2'-O-methyladenosine-3'-phosphate
  modified_base 21: mod_base = OTHER; note = 2'-O-methyladenosine-3'-phosphate conjugated at the 3'-end to an L96 ligand
aacagtgttcttgctctataa

SEQ ID NO: 620 - RNA, 21 nt, synthetic construct
  source 1..21: mol_type = other RNA
  modified_base 1: mod_base = OTHER; note = 2'-O-methyladenosine-3'-phosphorothioate
  modified_base 2: mod_base = OTHER; note = 2'-O-methyladenosine-3'-phosphorothioate
  modified_base 3: mod_base = OTHER; note = 2'-O-methylcytidine-3'-phosphate
  modified_base 4: mod_base = OTHER; note = 2'-O-methyladenosine-3'-phosphate
  modified_base 5: mod_base = OTHER; note = 2'-O-methylguanosine-3'-phosphate
  modified_base 6: mod_base = OTHER; note = 2'-O-methyluridine-3'-phosphate
  modified_base 7: mod_base = OTHER; note = 2'-deoxy-2'-fluoroguanosine-3'-phosphate
  modified_base 8: mod_base = OTHER; note = 2'-O-methyluridine-3'-phosphate
  modified_base 9: mod_base = OTHER; note = 2'-deoxy-2'-fluorouridine-3'-phosphate
  modified_base 10: mod_base = OTHER; note = 2'-deoxy-2'-fluorocytidine-3'-phosphate
  modified_base 11: mod_base = OTHER; note = 2'-deoxy-2'-fluorouridine-3'-phosphate
  modified_base 12: mod_base = OTHER; note = 2'-O-methyluridine-3'-phosphate
  modified_base 13: mod_base = OTHER; note = 2'-O-methylguanosine-3'-phosphate
  modified_base 14: mod_base = OTHER; note = 2'-O-methylcytidine-3'-phosphate
  modified_base 15: mod_base = OTHER; note = 2'-O-methyluridine-3'-phosphate
  modified_base 16: mod_base = OTHER; note = 2'-O-methylcytidine-3'-phosphate
  modified_base 17: mod_base = OTHER; note = 2'-O-methyluridine-3'-phosphate
  modified_base 18: mod_base = OTHER; note = 2'-O-methyladenosine-3'-phosphate
  modified_base 19: mod_base = OTHER; note = 2'-O-methyluridine-3'-phosphate
  modified_base 20: mod_base = OTHER; note = 2'-O-methyladenosine-3'-phosphate
  modified_base 21: mod_base = OTHER; note = 2'-O-methyladenosine-3'-phosphate conjugated at the 3'-end to an L96 ligand
aacagtgttcttgctctataa

SEQ ID NO: 621 - RNA, 21 nt, synthetic construct
  source 1..21: mol_type = other RNA
  modified_base 1: mod_base = OTHER; note = 2'-O-methyladenosine-3'-phosphorothioate
  modified_base 2: mod_base = OTHER; note = 2'-O-methyladenosine-3'-phosphorothioate
  modified_base 3: mod_base = OTHER; note = 2'-O-methylcytidine-3'-phosphate
  modified_base 4: mod_base = OTHER; note = 2'-O-methyladenosine-3'-phosphate
  modified_base 5: mod_base = OTHER; note = 2'-O-methylguanosine-3'-phosphate
  modified_base 6: mod_base = OTHER; note = 2'-O-methyluridine-3'-phosphate
  modified_base 7: mod_base = OTHER; note = 2'-deoxy-2'-fluoroguanosine-3'-phosphate
  modified_base 8: mod_base = OTHER; note = 2'-O-methyluridine-3'-phosphate
  modified_base 9: mod_base = OTHER; note = 2'-deoxy-2'-fluorouridine-3'-phosphate
  modified_base 10: mod_base = OTHER; note = 2'-deoxy-2'-fluorocytidine-3'-phosphate
  modified_base 11: mod_base = OTHER; note = 2'-deoxy-2'-fluorouridine-3'-phosphate
  modified_base 12: mod_base = OTHER; note = 2'-O-methyluridine-3'-phosphate
  modified_base 13: mod_base = OTHER; note = 2'-O-methylguanosine-3'-phosphate
  modified_base 14: mod_base = OTHER; note = 2'-O-methylcytidine-3'-phosphate
  modified_base 15: mod_base = OTHER; note = 2'-O-methyluridine-3'-phosphate
  modified_base 16: mod_base = OTHER; note = 2'-O-methylcytidine-3'-phosphate
  modified_base 17: mod_base = OTHER; note = 2'-O-methyluridine-3'-phosphate
  modified_base 18: mod_base = OTHER; note = 2'-O-methyladenosine-3'-phosphate
  modified_base 19: mod_base = OTHER; note = 2'-O-methyluridine-3'-phosphate
  modified_base 20: mod_base = OTHER; note = 2'-O-methyladenosine-3'-phosphate
  modified_base 21: mod_base = OTHER; note = 2'-O-methyladenosine-3'-phosphate conjugated at the 3'-end to an L96 ligand
aacagtgttcttgctctataa

SEQ ID NO: 622 - RNA, 21 nt, synthetic construct
  source 1..21: mol_type = other RNA
  modified_base 1: mod_base = OTHER; note = 2'-O-methyladenosine-3'-phosphorothioate
  modified_base 2: mod_base = OTHER; note = 2'-O-methyladenosine-3'-phosphorothioate
  modified_base 3: mod_base = OTHER; note = 2'-O-methylcytidine-3'-phosphate
  modified_base 4: mod_base = OTHER; note = 2'-O-methyladenosine-3'-phosphate
  modified_base 5: mod_base = OTHER; note = 2'-O-methylguanosine-3'-phosphate
  modified_base 6: mod_base = OTHER; note = 2'-O-methyluridine-3'-phosphate
  modified_base 7: mod_base = OTHER; note = 2'-deoxy-2'-fluoroguanosine-3'-phosphate
  modified_base 8: mod_base = OTHER; note = 2'-O-methyluridine-3'-phosphate
  modified_base 9: mod_base = OTHER; note = 2'-deoxy-2'-fluorouridine-3'-phosphate
  modified_base 10: mod_base = OTHER; note = 2'-deoxy-2'-fluorocytidine-3'-phosphate
  modified_base 11: mod_base = OTHER; note = 2'-deoxy-2'-fluorouridine-3'-phosphate
  modified_base 12: mod_base = OTHER; note = 2'-O-methyluridine-3'-phosphate
  modified_base 13: mod_base = OTHER; note = 2'-O-methylguanosine-3'-phosphate
  modified_base 14: mod_base = OTHER; note = 2'-O-methylcytidine-3'-phosphate
  modified_base 15: mod_base = OTHER; note = 2'-O-methyluridine-3'-phosphate
  modified_base 16: mod_base = OTHER; note = 2'-O-methylcytidine-3'-phosphate
  modified_base 17: mod_base = OTHER; note = 2'-O-methyluridine-3'-phosphate
  modified_base 18: mod_base = OTHER; note = 2'-O-methyladenosine-3'-phosphate
  modified_base 19: mod_base = OTHER; note = 2'-O-methyluridine-3'-phosphate
  modified_base 20: mod_base = OTHER; note = 2'-O-methyladenosine-3'-phosphate
  modified_base 21: mod_base = OTHER; note = 2'-O-methyladenosine-3'-phosphate conjugated at the 3'-end to an L96 ligand
aacagtgttcttgctctataa

SEQ ID NO: 623 - RNA, 21 nt, synthetic construct
  source 1..21: mol_type = other RNA
  modified_base 1: mod_base = OTHER; note = 2'-O-methyladenosine-3'-phosphorothioate
  modified_base 2: mod_base = OTHER; note = 2'-O-methyladenosine-3'-phosphorothioate
  modified_base 3: mod_base = OTHER; note = 2'-O-methylcytidine-3'-phosphate
  modified_base 4: mod_base = OTHER; note = 2'-O-methyladenosine-3'-phosphate
  modified_base 5: mod_base = OTHER; note = 2'-O-methylguanosine-3'-phosphate
  modified_base 6: mod_base = OTHER; note = 2'-O-methyluridine-3'-phosphate
  modified_base 7: mod_base = OTHER; note = 2'-deoxy-2'-fluoroguanosine-3'-phosphate
  modified_base 8: mod_base = OTHER; note = 2'-O-methyluridine-3'-phosphate
  modified_base 9: mod_base = OTHER; note = 2'-deoxy-2'-fluorouridine-3'-phosphate
  modified_base 10: mod_base = OTHER; note = 2'-deoxy-2'-fluorocytidine-3'-phosphate
  modified_base 11: mod_base = OTHER; note = 2'-deoxy-2'-fluorouridine-3'-phosphate
  modified_base 12: mod_base = OTHER; note = 2'-O-methyluridine-3'-phosphate
  modified_base 13: mod_base = OTHER; note = 2'-O-methylguanosine-3'-phosphate
  modified_base 14: mod_base = OTHER; note = 2'-O-methylcytidine-3'-phosphate
  modified_base 15: mod_base = OTHER; note = 2'-O-methyluridine-3'-phosphate
  modified_base 16: mod_base = OTHER; note = 2'-O-methylcytidine-3'-phosphate
  modified_base 17: mod_base = OTHER; note = 2'-O-methyluridine-3'-phosphate
  modified_base 18: mod_base = OTHER; note = 2'-O-methyladenosine-3'-phosphate
  modified_base 19: mod_base = OTHER; note = 2'-O-methyluridine-3'-phosphate
  modified_base 20: mod_base = OTHER; note = 2'-O-methyladenosine-3'-phosphate
  modified_base 21: mod_base = OTHER; note = 2'-O-methyladenosine-3'-phosphate conjugated at the 3'-end to an L96 ligand
aacagtgttcttgctctataa

SEQ ID NO: 624 - RNA, 21 nt, synthetic construct
  source 1..21: mol_type = other RNA
  modified_base 1: mod_base = OTHER; note = 2'-O-methyladenosine-3'-phosphorothioate
  modified_base 2: mod_base = OTHER; note = 2'-O-methyladenosine-3'-phosphorothioate
  modified_base 3: mod_base = OTHER; note = 2'-O-methylcytidine-3'-phosphate
  modified_base 4: mod_base = OTHER; note = 2'-O-methyladenosine-3'-phosphate
  modified_base 5: mod_base = OTHER; note = 2'-O-methylguanosine-3'-phosphate
  modified_base 6: mod_base = OTHER; note = 2'-O-methyluridine-3'-phosphate
  modified_base 7: mod_base = OTHER; note = 2'-deoxy-2'-fluoroguanosine-3'-phosphate
  modified_base 8: mod_base = OTHER; note = 2'-O-methyluridine-3'-phosphate
  modified_base 9: mod_base = OTHER; note = 2'-deoxy-2'-fluorouridine-3'-phosphate
  modified_base 10: mod_base = OTHER; note = 2'-deoxy-2'-fluorocytidine-3'-phosphate
  modified_base 11: mod_base = OTHER; note = 2'-deoxy-2'-fluorouridine-3'-phosphate
  modified_base 12: mod_base = OTHER; note = 2'-O-methyluridine-3'-phosphate
  modified_base 13: mod_base = OTHER; note = 2'-O-methylguanosine-3'-phosphate
  modified_base 14: mod_base = OTHER; note = 2'-O-methylcytidine-3'-phosphate
  modified_base 15: mod_base = OTHER; note = 2'-O-methyluridine-3'-phosphate
  modified_base 16: mod_base = OTHER; note = 2'-O-methylcytidine-3'-phosphate
  modified_base 17: mod_base = OTHER; note = 2'-O-methyluridine-3'-phosphate
  modified_base 18: mod_base = OTHER; note = 2'-O-methyladenosine-3'-phosphate
  modified_base 19: mod_base = OTHER; note = 2'-O-methyluridine-3'-phosphate
  modified_base 20: mod_base = OTHER; note = 2'-O-methyladenosine-3'-phosphate
  modified_base 21: mod_base = OTHER; note = 2'-O-methyladenosine-3'-phosphate conjugated at the 3'-end to an L96 ligand
aacagtgttcttgctctataa

SEQ ID NO: 625 - RNA, 21 nt, synthetic construct
  source 1..21: mol_type = other RNA
  modified_base 1: mod_base = OTHER; note = 2'-O-methyladenosine-3'-phosphorothioate
  modified_base 2: mod_base = OTHER; note = 2'-O-methyladenosine-3'-phosphorothioate
  modified_base 3: mod_base = OTHER; note = 2'-O-methylcytidine-3'-phosphate
  modified_base 4: mod_base = OTHER; note = 2'-O-methyladenosine-3'-phosphate
  modified_base 5: mod_base = OTHER; note = 2'-O-methylguanosine-3'-phosphate
  modified_base 6: mod_base = OTHER; note = 2'-O-methyluridine-3'-phosphate
  modified_base 7: mod_base = OTHER; note = 2'-deoxy-2'-fluoroguanosine-3'-phosphate
  modified_base 8: mod_base = OTHER; note = 2'-O-methyluridine-3'-phosphate
  modified_base 9: mod_base = OTHER; note = 2'-deoxy-2'-fluorouridine-3'-phosphate
  modified_base 10: mod_base = OTHER; note = 2'-deoxy-2'-fluorocytidine-3'-phosphate
  modified_base 11: mod_base = OTHER; note = 2'-deoxy-2'-fluorouridine-3'-phosphate
  modified_base 12: mod_base = OTHER; note = 2'-O-methyluridine-3'-phosphate
  modified_base 13: mod_base = OTHER; note = 2'-O-methylguanosine-3'-phosphate
  modified_base 14: mod_base = OTHER; note = 2'-O-methylcytidine-3'-phosphate
  modified_base 15: mod_base = OTHER; note = 2'-O-methyluridine-3'-phosphate
  modified_base 16: mod_base = OTHER; note = 2'-O-methylcytidine-3'-phosphate
  modified_base 17: mod_base = OTHER; note = 2'-O-methyluridine-3'-phosphate
  modified_base 18: mod_base = OTHER; note = 2'-O-methyladenosine-3'-phosphate
  modified_base 19: mod_base = OTHER; note = 2'-O-methyluridine-3'-phosphate
  modified_base 20: mod_base = OTHER; note = 2'-O-methyladenosine-3'-phosphate
  modified_base 21: mod_base = OTHER; note = 2'-O-methyladenosine-3'-phosphate conjugated at the 3'-end to an L96 ligand
aacagtgttcttgctctataa

SEQ ID NO: 626 - RNA, 23 nt, synthetic construct
  source 1..23: mol_type = other RNA
  modified_base 1: mod_base = OTHER; note = 2'-O-methyluridine-3'-phosphorothioate
  modified_base 2: mod_base = OTHER; note = 2'-deoxy-2'-fluorouridine-3'-phosphorothioate
  modified_base 3: mod_base = OTHER; note = 2'-O-methyladenosine-3'-phosphate
  modified_base 4: mod_base = OTHER; note = 2'-O-methyluridine-3'-phosphate
  modified_base 5: mod_base = OTHER; note = 2'-O-methyladenosine-3'-phosphate
  modified_base 6: mod_base = OTHER; note = 2'-deoxy-2'-fluoroguanosine-3'-phosphate
  modified_base 7: mod_base = OTHER; note = 2'-O-methyladenosine-3'-phosphate
  modified_base 8: mod_base = OTHER; note = 2'-O-methylguanosine-3'-phosphate
  modified_base 9: mod_base = OTHER; note = 2'-O-methylcytidine-3'-phosphate
  modified_base 10: mod_base = OTHER; note = 2'-O-methyladenosine-3'-phosphate
  modified_base 11: mod_base = OTHER; note = 2'-O-methyladenosine-3'-phosphate
  modified_base 12: mod_base = OTHER; note = 2'-O-methylguanosine-3'-phosphate
  modified_base 13: mod_base = OTHER; note = 2'-O-methyladenosine-3'-phosphate
  modified_base 14: mod_base = OTHER; note = 2'-deoxy-2'-fluoroadenosine-3'-phosphate
  modified_base 15: mod_base = OTHER; note = 2'-O-methylcytidine-3'-phosphate
  modified_base 16: mod_base = OTHER; note = 2'-deoxy-2'-fluoroadenosine-3'-phosphate
  modified_base 17: mod_base = OTHER; note = 2'-O-methylcytidine-3'-phosphate
  modified_base 18: mod_base = OTHER; note = 2'-O-methyluridine-3'-phosphate
  modified_base 19: mod_base = OTHER; note = 2'-O-methylguanosine-3'-phosphate
  modified_base 20: mod_base = OTHER; note = 2'-O-methyluridine-3'-phosphate
  modified_base 21: mod_base = OTHER; note = 2'-O-methyluridine-3'-phosphorothioate
  modified_base 22: mod_base = OTHER; note = 2'-O-methyluridine-3'-phosphorothioate
  modified_base 23: mod_base = OTHER; note = 2'-O-methyluridine
ttatagagcaagaacactgtttt

SEQ ID NO: 627 - RNA, 23 nt, synthetic construct
  source 1..23: mol_type = other RNA
  modified_base 1: mod_base = OTHER; note = 2'-O-methyluridine-3'-phosphorothioate
  modified_base 2: mod_base = OTHER; note = 2'-deoxy-2'-fluorouridine-3'-phosphorothioate
  modified_base 3: mod_base = OTHER; note = 2'-O-methyladenosine-3'-phosphate
  modified_base 4: mod_base = OTHER; note (2S,4R)-N-acetyl-2-hydroxymethyl-4-hydroxypyrrolidine 4-phosphate
  modified_base 5: mod_base = OTHER; note = 2'-O-methyladenosine-3'-phosphate
  modified_base 6: mod_base = OTHER; note = 2'-deoxy-2'-fluoroguanosine-3'-phosphate
  modified_base 7: mod_base = OTHER; note = 2'-O-methyladenosine-3'-phosphate
  modified_base 8: mod_base = OTHER; note = 2'-O-methylguanosine-3'-phosphate
  modified_base 9: mod_base = OTHER; note = 2'-O-methylcytidine-3'-phosphate
  modified_base 10: mod_base = OTHER; note = 2'-O-methyladenosine-3'-phosphate
  modified_base 11: mod_base = OTHER; note = 2'-O-methyladenosine-3'-phosphate
  modified_base 12: mod_base = OTHER; note = 2'-O-methylguanosine-3'-phosphate
  modified_base 13: mod_base = OTHER; note = 2'-O-methyladenosine-3'-phosphate
  modified_base 14: mod_base = OTHER; note = 2'-deoxy-2'-fluoroadenosine-3'-phosphate
  modified_base 15: mod_base = OTHER; note = 2'-O-methylcytidine-3'-phosphate
  modified_base 16: mod_base = OTHER; note = 2'-deoxy-2'-fluoroadenosine-3'-phosphate
  modified_base 17: mod_base = OTHER; note = 2'-O-methylcytidine-3'-phosphate
  modified_base 18: mod_base = OTHER; note = 2'-O-methyluridine-3'-phosphate
  modified_base 19: mod_base = OTHER; note = 2'-O-methylguanosine-3'-phosphate
  modified_base 20: mod_base = OTHER; note = 2'-O-methyluridine-3'-phosphate
  modified_base 21: mod_base = OTHER; note = 2'-O-methyluridine-3'-phosphorothioate
  modified_base 22: mod_base = OTHER; note = 2'-O-methyluridine-3'-phosphorothioate
  modified_base 23: mod_base = OTHER; note = 2'-O-methyluridine
ttanagagcaagaacactgtttt

SEQ ID NO: 628 - RNA, 23 nt, synthetic construct
  source 1..23: mol_type = other RNA
  modified_base 1: mod_base = OTHER; note = 2'-O-methyluridine-3'-phosphorothioate
  modified_base 2: mod_base = OTHER; note = 2'-deoxy-2'-fluorouridine-3'-phosphorothioate
  modified_base 3: mod_base = OTHER; note = 2'-O-methyladenosine-3'-phosphate
  modified_base 4: mod_base = OTHER; note (2S,4R)-N-(2-(thymin-1-yl)-1-oxoethyl)-2-hydroxymethyl-4-hy droxypyrrolidine 4-phosphate
  modified_base 5: mod_base = OTHER; note = 2'-O-methyladenosine-3'-phosphate
  modified_base 6: mod_base = OTHER; note = 2'-deoxy-2'-fluoroguanosine-3'-phosphate
  modified_base 7: mod_base = OTHER; note = 2'-O-methyladenosine-3'-phosphate
  modified_base 8: mod_base = OTHER; note = 2'-O-methylguanosine-3'-phosphate
  modified_base 9: mod_base = OTHER; note = 2'-O-methylcytidine-3'-phosphate
  modified_base 10: mod_base = OTHER; note = 2'-O-methyladenosine-3'-phosphate
  modified_base 11: mod_base = OTHER; note = 2'-O-methyladenosine-3'-phosphate
  modified_base 12: mod_base = OTHER; note = 2'-O-methylguanosine-3'-phosphate
  modified_base 13: mod_base = OTHER; note = 2'-O-methyladenosine-3'-phosphate
  modified_base 14: mod_base = OTHER; note = 2'-deoxy-2'-fluoroadenosine-3'-phosphate
  modified_base 15: mod_base = OTHER; note = 2'-O-methylcytidine-3'-phosphate
  modified_base 16: mod_base = OTHER; note = 2'-deoxy-2'-fluoroadenosine-3'-phosphate
  modified_base 17: mod_base = OTHER; note = 2'-O-methylcytidine-3'-phosphate
  modified_base 18: mod_base = OTHER; note = 2'-O-methyluridine-3'-phosphate
  modified_base 19: mod_base = OTHER; note = 2'-O-methylguanosine-3'-phosphate
  modified_base 20: mod_base = OTHER; note = 2'-O-methyluridine-3'-phosphate
  modified_base 21: mod_base = OTHER; note = 2'-O-methyluridine-3'-phosphorothioate
  modified_base 22: mod_base = OTHER; note = 2'-O-methyluridine-3'-phosphorothioate
  modified_base 23: mod_base = OTHER; note = 2'-O-methyluridine
ttatagagcaagaacactgtttt

SEQ ID NO: 629 - RNA, 23 nt, synthetic construct
  source 1..23: mol_type = other RNA
  modified_base 1: mod_base = OTHER; note = 2'-O-methyluridine-3'-phosphorothioate
  modified_base 2: mod_base = OTHER; note = 2'-deoxy-2'-fluorouridine-3'-phosphorothioate
  modified_base 3: mod_base = OTHER; note = 2'-O-methyladenosine-3'-phosphate
  modified_base 4: mod_base = OTHER; note = 2'-O-methyluridine-3'-phosphate
  modified_base 5: mod_base = OTHER; note (2S,4R)-N-acetyl-2-hydroxymethyl-4-hydroxypyrrolidine 4-phosphate
  modified_base 6: mod_base = OTHER; note = 2'-deoxy-2'-fluoroguanosine-3'-phosphate
  modified_base 7: mod_base = OTHER; note = 2'-O-methyladenosine-3'-phosphate
  modified_base 8: mod_base = OTHER; note = 2'-O-methylguanosine-3'-phosphate
  modified_base 9: mod_base = OTHER; note = 2'-O-methylcytidine-3'-phosphate
  modified_base 10: mod_base = OTHER; note = 2'-O-methyladenosine-3'-phosphate
  modified_base 11: mod_base = OTHER; note = 2'-O-methyladenosine-3'-phosphate
  modified_base 12: mod_base = OTHER; note = 2'-O-methylguanosine-3'-phosphate
  modified_base 13: mod_base = OTHER; note = 2'-O-methyladenosine-3'-phosphate
  modified_base 14: mod_base = OTHER; note = 2'-deoxy-2'-fluoroadenosine-3'-phosphate
  modified_base 15: mod_base = OTHER; note = 2'-O-methylcytidine-3'-phosphate
  modified_base 16: mod_base = OTHER; note = 2'-deoxy-2'-fluoroadenosine-3'-phosphate
  modified_base 17: mod_base = OTHER; note = 2'-O-methylcytidine-3'-phosphate
  modified_base 18: mod_base = OTHER; note = 2'-O-methyluridine-3'-phosphate
  modified_base 19: mod_base = OTHER; note = 2'-O-methylguanosine-3'-phosphate
  modified_base 20: mod_base = OTHER; note = 2'-O-methyluridine-3'-phosphate
  modified_base 21: mod_base = OTHER; note = 2'-O-methyluridine-3'-phosphorothioate
  modified_base 22: mod_base = OTHER; note = 2'-O-methyluridine-3'-phosphorothioate
  modified_base 23: mod_base = OTHER; note = 2'-O-methyluridine
ttatngagcaagaacactgtttt

SEQ ID NO: 630 - RNA, 23 nt, synthetic construct
  source 1..23: mol_type = other RNA
  modified_base 1: mod_base = OTHER; note = 2'-O-methyluridine-3'-phosphorothioate
  modified_base 2: mod_base = OTHER; note = 2'-deoxy-2'-fluorouridine-3'-phosphorothioate
  modified_base 3: mod_base = OTHER; note = 2'-O-methyladenosine-3'-phosphate
  modified_base 4: mod_base = OTHER; note = 2'-O-methyluridine-3'-phosphate
  modified_base 5: mod_base = OTHER; note (2S,4R)-N-(2-(adenin-9-yl)-1-oxoethyl)-2-hydroxymethyl-4-hy droxypyrrolidine 4-phosphate
  modified_base 6: mod_base = OTHER; note = 2'-deoxy-2'-fluoroguanosine-3'-phosphate
  modified_base 7: mod_base = OTHER; note = 2'-O-methyladenosine-3'-phosphate
  modified_base 8: mod_base = OTHER; note = 2'-O-methylguanosine-3'-phosphate
  modified_base 9: mod_base = OTHER; note = 2'-O-methylcytidine-3'-phosphate
  modified_base 10: mod_base = OTHER; note = 2'-O-methyladenosine-3'-phosphate
  modified_base 11: mod_base = OTHER; note = 2'-O-methyladenosine-3'-phosphate
  modified_base 12: mod_base = OTHER; note = 2'-O-methylguanosine-3'-phosphate
  modified_base 13: mod_base = OTHER; note = 2'-O-methyladenosine-3'-phosphate
  modified_base 14: mod_base = OTHER; note = 2'-deoxy-2'-fluoroadenosine-3'-phosphate
  modified_base 15: mod_base = OTHER; note = 2'-O-methylcytidine-3'-phosphate
  modified_base 16: mod_base = OTHER; note = 2'-deoxy-2'-fluoroadenosine-3'-phosphate
  modified_base 17: mod_base = OTHER; note = 2'-O-methylcytidine-3'-phosphate
  modified_base 18: mod_base = OTHER; note = 2'-O-methyluridine-3'-phosphate
  modified_base 19: mod_base = OTHER; note = 2'-O-methylguanosine-3'-phosphate
  modified_base 20: mod_base = OTHER; note = 2'-O-methyluridine-3'-phosphate
  modified_base 21: mod_base = OTHER; note = 2'-O-methyluridine-3'-phosphorothioate
  modified_base 22: mod_base = OTHER; note = 2'-O-methyluridine-3'-phosphorothioate
  modified_base 23: mod_base = OTHER; note = 2'-O-methyluridine
ttatagagcaagaacactgtttt

SEQ ID NO: 631 - RNA, 23 nt, synthetic construct
  source 1..23: mol_type = other RNA
  modified_base 1: mod_base = OTHER; note = 2'-O-methyluridine-3'-phosphorothioate
  modified_base 2: mod_base = OTHER; note = 2'-deoxy-2'-fluorouridine-3'-phosphorothioate
  modified_base 3: mod_base = OTHER; note = 2'-O-methyladenosine-3'-phosphate
  modified_base 4: mod_base = OTHER; note = 2'-O-methyluridine-3'-phosphate
  modified_base 5: mod_base = OTHER; note = 2'-O-methyladenosine-3'-phosphate
  modified_base 6: mod_base = OTHER; note (2S,4R)-N-acetyl-2-hydroxymethyl-4-hydroxypyrrolidine 4-phosphate
  modified_base 7: mod_base = OTHER; note = 2'-O-methyladenosine-3'-phosphate
  modified_base 8: mod_base = OTHER; note = 2'-O-methylguanosine-3'-phosphate
  modified_base 9: mod_base = OTHER; note = 2'-O-methylcytidine-3'-phosphate
  modified_base 10: mod_base = OTHER; note = 2'-O-methyladenosine-3'-phosphate
  modified_base 11: mod_base = OTHER; note = 2'-O-methyladenosine-3'-phosphate
  modified_base 12: mod_base = OTHER; note = 2'-O-methylguanosine-3'-phosphate
  modified_base 13: mod_base = OTHER; note = 2'-O-methyladenosine-3'-phosphate
  modified_base 14: mod_base = OTHER; note = 2'-deoxy-2'-fluoroadenosine-3'-phosphate
  modified_base 15: mod_base = OTHER; note = 2'-O-methylcytidine-3'-phosphate
  modified_base 16: mod_base = OTHER; note = 2'-deoxy-2'-fluoroadenosine-3'-phosphate
  modified_base 17: mod_base = OTHER; note = 2'-O-methylcytidine-3'-phosphate
  modified_base 18: mod_base = OTHER; note = 2'-O-methyluridine-3'-phosphate
  modified_base 19: mod_base = OTHER; note = 2'-O-methylguanosine-3'-phosphate
  modified_base 20: mod_base = OTHER; note = 2'-O-methyluridine-3'-phosphate
  modified_base 21: mod_base = OTHER; note = 2'-O-methyluridine-3'-phosphorothioate
  modified_base 22: mod_base = OTHER; note = 2'-O-methyluridine-3'-phosphorothioate
  modified_base 23: mod_base = OTHER; note = 2'-O-methyluridine
ttatanagcaagaacactgtttt

SEQ ID NO: 632 - RNA, 23 nt, synthetic construct
  source 1..23: mol_type = other RNA
  modified_base 1: mod_base = OTHER; note = 2'-O-methyluridine-3'-phosphorothioate
  modified_base 2: mod_base = OTHER; note = 2'-deoxy-2'-fluorouridine-3'-phosphorothioate
  modified_base 3: mod_base = OTHER; note = 2'-O-methyladenosine-3'-phosphate
  modified_base 4: mod_base = OTHER; note = 2'-O-methyluridine-3'-phosphate
  modified_base 5: mod_base = OTHER; note = 2'-O-methyladenosine-3'-phosphate
  modified_base 6: mod_base = OTHER; note (2S,4R)-N-(2-(guanin-9-yl)-1-oxoethyl)-2-hydroxymethyl-4-hy droxypyrrolidine 4-phosphate
  modified_base 7: mod_base = OTHER; note = 2'-O-methyladenosine-3'-phosphate
  modified_base 8: mod_base = OTHER; note = 2'-O-methylguanosine-3'-phosphate
  modified_base 9: mod_base = OTHER; note = 2'-O-methylcytidine-3'-phosphate
  modified_base 10: mod_base = OTHER; note = 2'-O-methyladenosine-3'-phosphate
  modified_base 11: mod_base = OTHER; note = 2'-O-methyladenosine-3'-phosphate
  modified_base 12: mod_base = OTHER; note = 2'-O-methylguanosine-3'-phosphate
  modified_base 13: mod_base = OTHER; note = 2'-O-methyladenosine-3'-phosphate
  modified_base 14: mod_base = OTHER; note = 2'-deoxy-2'-fluoroadenosine-3'-phosphate
  modified_base 15: mod_base = OTHER; note = 2'-O-methylcytidine-3'-phosphate
  modified_base 16: mod_base = OTHER; note = 2'-deoxy-2'-fluoroadenosine-3'-phosphate
  modified_base 17: mod_base = OTHER; note = 2'-O-methylcytidine-3'-phosphate
  modified_base 18: mod_base = OTHER; note = 2'-O-methyluridine-3'-phosphate
  modified_base 19: mod_base = OTHER; note = 2'-O-methylguanosine-3'-phosphate
  modified_base 20: mod_base = OTHER; note = 2'-O-methyluridine-3'-phosphate
  modified_base 21: mod_base = OTHER; note = 2'-O-methyluridine-3'-phosphorothioate
  modified_base 22: mod_base = OTHER; note = 2'-O-methyluridine-3'-phosphorothioate
  modified_base 23: mod_base = OTHER; note = 2'-O-methyluridine
ttatagagcaagaacactgtttt

SEQ ID NO: 633 - RNA, 23 nt, synthetic construct
  source 1..23: mol_type = other RNA
  modified_base 1: mod_base = OTHER; note = 2'-O-methyluridine-3'-phosphorothioate
  modified_base 2: mod_base = OTHER; note = 2'-deoxy-2'-fluorouridine-3'-phosphorothioate
  modified_base 3: mod_base = OTHER; note = 2'-O-methyladenosine-3'-phosphate
  modified_base 4: mod_base = OTHER; note = 2'-O-methyluridine-3'-phosphate
  modified_base 5: mod_base = OTHER; note = 2'-O-methyladenosine-3'-phosphate
  modified_base 6: mod_base = OTHER; note = 2'-deoxy-2'-fluoroguanosine-3'-phosphate
  modified_base 7: mod_base = OTHER; note (2S,4R)-N-acetyl-2-hydroxymethyl-4-hydroxypyrrolidine 4-phosphate
  modified_base 8: mod_base = OTHER; note = 2'-O-methylguanosine-3'-phosphate
  modified_base 9: mod_base = OTHER; note = 2'-O-methylcytidine-3'-phosphate
  modified_base 10: mod_base = OTHER; note = 2'-O-methyladenosine-3'-phosphate
  modified_base 11: mod_base = OTHER; note = 2'-O-methyladenosine-3'-phosphate
  modified_base 12: mod_base = OTHER; note = 2'-O-methylguanosine-3'-phosphate
  modified_base 13: mod_base = OTHER; note = 2'-O-methyladenosine-3'-phosphate
  modified_base 14: mod_base = OTHER; note = 2'-deoxy-2'-fluoroadenosine-3'-phosphate
  modified_base 15: mod_base = OTHER; note = 2'-O-methylcytidine-3'-phosphate
  modified_base 16: mod_base = OTHER; note = 2'-deoxy-2'-fluoroadenosine-3'-phosphate
  modified_base 17: mod_base = OTHER; note = 2'-O-methylcytidine-3'-phosphate
  modified_base 18: mod_base = OTHER; note = 2'-O-methyluridine-3'-phosphate
  modified_base 19: mod_base = OTHER; note = 2'-O-methylguanosine-3'-phosphate
  modified_base 20: mod_base = OTHER; note = 2'-O-methyluridine-3'-phosphate
  modified_base 21: mod_base = OTHER; note = 2'-O-methyluridine-3'-phosphorothioate
  modified_base 22: mod_base = OTHER; note = 2'-O-methyluridine-3'-phosphorothioate
  modified_base 23: mod_base = OTHER; note = 2'-O-methyluridine
ttatagngcaagaacactgtttt

SEQ ID NO: 634 - RNA, 23 nt, synthetic construct
  source 1..23: mol_type = other RNA
  modified_base 1: mod_base = OTHER; note = 2'-O-methyluridine-3'-phosphorothioate
  modified_base 2: mod_base = OTHER; note = 2'-deoxy-2'-fluorouridine-3'-phosphorothioate
  modified_base 3: mod_base = OTHER; note = 2'-O-methyladenosine-3'-phosphate
  modified_base 4: mod_base = OTHER; note = 2'-O-methyluridine-3'-phosphate
  modified_base 5: mod_base = OTHER; note = 2'-O-methyladenosine-3'-phosphate
  modified_base 6: mod_base = OTHER; note = 2'-deoxy-2'-fluoroguanosine-3'-phosphate
  modified_base 7: mod_base = OTHER; note (2S,4R)-N-(2-(adenin-9-yl)-1-oxoethyl)-2-hydroxymethyl-4-hy droxypyrrolidine 4-phosphate
  modified_base 8: mod_base = OTHER; note = 2'-O-methylguanosine-3'-phosphate
  modified_base 9: mod_base = OTHER; note = 2'-O-methylcytidine-3'-phosphate
  modified_base 10: mod_base = OTHER; note = 2'-O-methyladenosine-3'-phosphate
  modified_base 11: mod_base = OTHER; note = 2'-O-methyladenosine-3'-phosphate
  modified_base 12: mod_base = OTHER; note = 2'-O-methylguanosine-3'-phosphate
  modified_base 13: mod_base = OTHER; note = 2'-O-methyladenosine-3'-phosphate
  modified_base 14: mod_base = OTHER; note = 2'-deoxy-2'-fluoroadenosine-3'-phosphate
  modified_base 15: mod_base = OTHER; note = 2'-O-methylcytidine-3'-phosphate
  modified_base 16: mod_base = OTHER; note = 2'-deoxy-2'-fluoroadenosine-3'-phosphate
  modified_base 17: mod_base = OTHER; note = 2'-O-methylcytidine-3'-phosphate
  modified_base 18: mod_base = OTHER; note = 2'-O-methyluridine-3'-phosphate
  modified_base 19: mod_base = OTHER; note = 2'-O-methylguanosine-3'-phosphate
  modified_base 20: mod_base = OTHER; note = 2'-O-methyluridine-3'-phosphate
  modified_base 21: mod_base = OTHER; note = 2'-O-methyluridine-3'-phosphorothioate
  modified_base 22: mod_base = OTHER; note = 2'-O-methyluridine-3'-phosphorothioate
  modified_base 23: mod_base = OTHER; note = 2'-O-methyluridine
ttatagagcaagaacactgtttt

SEQ ID NO: 635 - RNA, 23 nt, synthetic construct
  source 1..23: mol_type = other RNA
  modified_base 1: mod_base = OTHER; note = 2'-O-methyluridine-3'-phosphorothioate
  modified_base 2: mod_base = OTHER; note = 2'-deoxy-2'-fluorouridine-3'-phosphorothioate
  modified_base 3: mod_base = OTHER; note = 2'-O-methyladenosine-3'-phosphate
  modified_base 4: mod_base = OTHER; note = 2'-O-methyluridine-3'-phosphate
  modified_base 5: mod_base = OTHER; note = 2'-O-methyladenosine-3'-phosphate
  modified_base 6: mod_base = OTHER; note = 2'-deoxy-2'-fluoroguanosine-3'-phosphate
  modified_base 7: mod_base = OTHER; note = 2'-O-methyladenosine-3'-phosphate
  modified_base 8: mod_base = OTHER; note (2S,4R)-N-acetyl-2-hydroxymethyl-4-hydroxypyrrolidine 4-phosphate
  modified_base 9: mod_base = OTHER; note = 2'-O-methylcytidine-3'-phosphate
  modified_base 10: mod_base = OTHER; note = 2'-O-methyladenosine-3'-phosphate
  modified_base 11: mod_base = OTHER; note = 2'-O-methyladenosine-3'-phosphate
  modified_base 12: mod_base = OTHER; note = 2'-O-methylguanosine-3'-phosphate
  modified_base 13: mod_base = OTHER; note = 2'-O-methyladenosine-3'-phosphate
  modified_base 14: mod_base = OTHER; note = 2'-deoxy-2'-fluoroadenosine-3'-phosphate
  modified_base 15: mod_base = OTHER; note = 2'-O-methylcytidine-3'-phosphate
  modified_base 16: mod_base = OTHER; note = 2'-deoxy-2'-fluoroadenosine-3'-phosphate
  modified_base 17: mod_base = OTHER; note = 2'-O-methylcytidine-3'-phosphate
  modified_base 18: mod_base = OTHER; note = 2'-O-methyluridine-3'-phosphate
  modified_base 19: mod_base = OTHER; note = 2'-O-methylguanosine-3'-phosphate
  modified_base 20: mod_base = OTHER; note = 2'-O-methyluridine-3'-phosphate
  modified_base 21: mod_base = OTHER; note = 2'-O-methyluridine-3'-phosphorothioate
  modified_base 22: mod_base = OTHER; note = 2'-O-methyluridine-3'-phosphorothioate
  modified_base 23: mod_base = OTHER; note = 2'-O-methyluridine
ttatagancaagaacactgtttt

SEQ ID NO: 636 - RNA, 23 nt, synthetic construct
  source 1..23: mol_type = other RNA
  modified_base 1: mod_base = OTHER; note = 2'-O-methyluridine-3'-phosphorothioate
  modified_base 2: mod_base = OTHER; note = 2'-deoxy-2'-fluorouridine-3'-phosphorothioate
  modified_base 3: mod_base = OTHER; note = 2'-O-methyladenosine-3'-phosphate
  modified_base 4: mod_base = OTHER; note = 2'-O-methyluridine-3'-phosphate
  modified_base 5: mod_base = OTHER; note = 2'-O-methyladenosine-3'-phosphate
  modified_base 6: mod_base = OTHER; note = 2'-deoxy-2'-fluoroguanosine-3'-phosphate
  modified_base 7: mod_base = OTHER; note = 2'-O-methyladenosine-3'-phosphate
  modified_base 8: mod_base = OTHER; note (2S,4R)-N-(2-(guanin-9-yl)-1-oxoethyl)-2-hydroxymethyl-4-hy droxypyrrolidine 4-phosphate
  modified_base 9: mod_base = OTHER; note = 2'-O-methylcytidine-3'-phosphate
  modified_base 10: mod_base = OTHER; note = 2'-O-methyladenosine-3'-phosphate
  modified_base 11: mod_base = OTHER; note = 2'-O-methyladenosine-3'-phosphate
  modified_base 12: mod_base = OTHER; note = 2'-O-methylguanosine-3'-phosphate
  modified_base 13: mod_base = OTHER; note = 2'-O-methyladenosine-3'-phosphate
  modified_base 14: mod_base = OTHER; note = 2'-deoxy-2'-fluoroadenosine-3'-phosphate
  modified_base 15: mod_base = OTHER; note = 2'-O-methylcytidine-3'-phosphate
  modified_base 16: mod_base = OTHER; note = 2'-deoxy-2'-fluoroadenosine-3'-phosphate
  modified_base 17: mod_base = OTHER; note = 2'-O-methylcytidine-3'-phosphate
  modified_base 18: mod_base = OTHER; note = 2'-O-methyluridine-3'-phosphate
  modified_base 19: mod_base = OTHER; note = 2'-O-methylguanosine-3'-phosphate
  modified_base 20: mod_base = OTHER; note = 2'-O-methyluridine-3'-phosphate
  modified_base 21: mod_base = OTHER; note = 2'-O-methyluridine-3'-phosphorothioate
  modified_base 22: mod_base = OTHER; note = 2'-O-methyluridine-3'-phosphorothioate
  modified_base 23: mod_base = OTHER; note = 2'-O-methyluridine
ttatagagcaagaacactgtttt

SEQ ID NO: 637 - RNA, 21 nt, synthetic construct
  source 1..21: mol_type = other RNA
  modified_base 1: mod_base = OTHER; note = 2'-O-methylguanosine-3'-phosphorothioate
  modified_base 2: mod_base = OTHER; note = 2'-O-methyladenosine-3'-phosphorothioate
  modified_base 3: mod_base = OTHER; note = 2'-O-methyladenosine-3'-phosphate
  modified_base 4: mod_base = OTHER; note = 2'-O-methyluridine-3'-phosphate
  modified_base 5: mod_base = OTHER; note = 2'-O-methylguanosine-3'-phosphate
  modified_base 6: mod_base = OTHER; note = 2'-O-methyluridine-3'-phosphate
  modified_base 7: mod_base = OTHER; note = 2'-deoxy-2'-fluoroguanosine-3'-phosphate
  modified_base 8: mod_base = OTHER; note = 2'-O-methyladenosine-3'-phosphate
  modified_base 9: mod_base = OTHER; note = 2'-O-methyladenosine-3'-phosphate
  modified_base 10: mod_base = OTHER; note = 2'-deoxy-2'-fluoroadenosine-3'-phosphate
  modified_base 11: mod_base = OTHER; note = 2'-deoxy-2'-fluoroguanosine-3'-phosphate
  modified_base 12: mod_base = OTHER; note = 2'-O-methyluridine-3'-phosphate
  modified_base 13: mod_base = OTHER; note = 2'-O-methylcytidine-3'-phosphate
  modified_base 14: mod_base = OTHER; note = 2'-O-methyladenosine-3'-phosphate
  modified_base 15: mod_base = OTHER; note = 2'-O-methyluridine-3'-phosphate
  modified_base 16: mod_base = OTHER; note = 2'-O-methylcytidine-3'-phosphate
  modified_base 17: mod_base = OTHER; note = 2'-O-methylguanosine-3'-phosphate
  modified_base 18: mod_base = OTHER; note = 2'-O-methyladenosine-3'-phosphate
  modified_base 19: mod_base = OTHER; note = 2'-O-methylcytidine-3'-phosphate
  modified_base 20: mod_base = OTHER; note = 2'-O-methyladenosine-3'-phosphate
  modified_base 21: mod_base = OTHER; note = 2'-O-methyladenosine-3'-phosphate conjugated at the 3'-end to an L96 ligand
gaatgtgaaagtcatcgacaa

SEQ ID NO: 638 - RNA, 21 nt, synthetic construct
  source 1..21: mol_type = other RNA
  modified_base 1: mod_base = OTHER; note = 2'-O-methylguanosine-3'-phosphorothioate
  modified_base 2: mod_base = OTHER; note = 2'-O-methyladenosine-3'-phosphorothioate
  modified_base 3: mod_base = OTHER; note = 2'-O-methyladenosine-3'-phosphate
  modified_base 4: mod_base = OTHER; note = 2'-O-methyluridine-3'-phosphate
  modified_base 5: mod_base = OTHER; note = 2'-O-methylguanosine-3'-phosphate
  modified_base 6: mod_base = OTHER; note = 2'-O-methyluridine-3'-phosphate
  modified_base 7: mod_base = OTHER; note = 2'-deoxy-2'-fluoroguanosine-3'-phosphate
  modified_base 8: mod_base = OTHER; note = 2'-O-methyladenosine-3'-phosphate
  modified_base 9: mod_base = OTHER; note = 2'-O-methyladenosine-3'-phosphate
  modified_base 10: mod_base = OTHER; note = 2'-deoxy-2'-fluoroadenosine-3'-phosphate
  modified_base 11: mod_base = OTHER; note = 2'-deoxy-2'-fluoroguanosine-3'-phosphate
  modified_base 12: mod_base = OTHER; note = 2'-O-methyluridine-3'-phosphate
  modified_base 13: mod_base = OTHER; note = 2'-O-methylcytidine-3'-phosphate
  modified_base 14: mod_base = OTHER; note = 2'-O-methyladenosine-3'-phosphate
  modified_base 15: mod_base = OTHER; note = 2'-O-methyluridine-3'-phosphate
  modified_base 16: mod_base = OTHER; note = 2'-O-methylcytidine-3'-phosphate
  modified_base 17: mod_base = OTHER; note = 2'-O-methylguanosine-3'-phosphate
  modified_base 18: mod_base = OTHER; note = 2'-O-methyladenosine-3'-phosphate
  modified_base 19: mod_base = OTHER; note = 2'-O-methylcytidine-3'-phosphate
  modified_base 20: mod_base = OTHER; note = 2'-O-methyladenosine-3'-phosphate
  modified_base 21: mod_base = OTHER; note = 2'-O-methyladenosine-3'-phosphate conjugated at the 3'-end to an L96 ligand
gaatgtgaaagtcatcgacaa

SEQ ID NO: 639 - RNA, 21 nt, synthetic construct
  source 1..21: mol_type = other RNA
  modified_base 1: mod_base = OTHER; note = 2'-O-methylguanosine-3'-phosphorothioate
  modified_base 2: mod_base = OTHER; note = 2'-O-methyladenosine-3'-phosphorothioate
  modified_base 3: mod_base = OTHER; note = 2'-O-methyladenosine-3'-phosphate
  modified_base 4: mod_base = OTHER; note = 2'-O-methyluridine-3'-phosphate
  modified_base 5: mod_base = OTHER; note = 2'-O-methylguanosine-3'-phosphate
  modified_base 6: mod_base = OTHER; note = 2'-O-methyluridine-3'-phosphate
  modified_base 7: mod_base = OTHER; note = 2'-deoxy-2'-fluoroguanosine-3'-phosphate
  modified_base 8: mod_base = OTHER; note = 2'-O-methyladenosine-3'-phosphate
  modified_base 9: mod_base = OTHER; note = 2'-O-methyladenosine-3'-phosphate
  modified_base 10: mod_base = OTHER; note = 2'-deoxy-2'-fluoroadenosine-3'-phosphate
  modified_base 11: mod_base = OTHER; note = 2'-deoxy-2'-fluoroguanosine-3'-phosphate
  modified_base 12: mod_base = OTHER; note = 2'-O-methyluridine-3'-phosphate
  modified_base 13: mod_base = OTHER; note = 2'-O-methylcytidine-3'-phosphate
  modified_base 14: mod_base = OTHER; note = 2'-O-methyladenosine-3'-phosphate
  modified_base 15: mod_base = OTHER; note = 2'-O-methyluridine-3'-phosphate
  modified_base 16: mod_base = OTHER; note = 2'-O-methylcytidine-3'-phosphate
  modified_base 17: mod_base = OTHER; note = 2'-O-methylguanosine-3'-phosphate
  modified_base 18: mod_base = OTHER; note = 2'-O-methyladenosine-3'-phosphate
  modified_base 19: mod_base = OTHER; note = 2'-O-methylcytidine-3'-phosphate
  modified_base 20: mod_base = OTHER; note = 2'-O-methyladenosine-3'-phosphate
  modified_base 21: mod_base = OTHER; note = 2'-O-methyladenosine-3'-phosphate conjugated at the 3'-end to an L96 ligand
gaatgtgaaagtcatcgacaa

SEQ ID NO: 640 - RNA, 21 nt, synthetic construct
  source 1..21: mol_type = other RNA
  modified_base 1: mod_base = OTHER; note = 2'-O-methylguanosine-3'-phosphorothioate
  modified_base 2: mod_base = OTHER; note = 2'-O-methyladenosine-3'-phosphorothioate
  modified_base 3: mod_base = OTHER; note = 2'-O-methyladenosine-3'-phosphate
  modified_base 4: mod_base = OTHER; note = 2'-O-methyluridine-3'-phosphate
  modified_base 5: mod_base = OTHER; note = 2'-O-methylguanosine-3'-phosphate
  modified_base 6: mod_base = OTHER; note = 2'-O-methyluridine-3'-phosphate
  modified_base 7: mod_base = OTHER; note = 2'-deoxy-2'-fluoroguanosine-3'-phosphate
  modified_base 8: mod_base = OTHER; note = 2'-O-methyladenosine-3'-phosphate
  modified_base 9: mod_base = OTHER; note = 2'-O-methyladenosine-3'-phosphate
  modified_base 10: mod_base = OTHER; note = 2'-deoxy-2'-fluoroadenosine-3'-phosphate
  modified_base 11: mod_base = OTHER; note = 2'-deoxy-2'-fluoroguanosine-3'-phosphate
  modified_base 12: mod_base = OTHER; note = 2'-O-methyluridine-3'-phosphate
  modified_base 13: mod_base = OTHER; note = 2'-O-methylcytidine-3'-phosphate
  modified_base 14: mod_base = OTHER; note = 2'-O-methyladenosine-3'-phosphate
  modified_base 15: mod_base = OTHER; note = 2'-O-methyluridine-3'-phosphate
  modified_base 16: mod_base = OTHER; note = 2'-O-methylcytidine-3'-phosphate
  modified_base 17: mod_base = OTHER; note = 2'-O-methylguanosine-3'-phosphate
  modified_base 18: mod_base = OTHER; note = 2'-O-methyladenosine-3'-phosphate
  modified_base 19: mod_base = OTHER; note = 2'-O-methylcytidine-3'-phosphate
  modified_base 20: mod_base = OTHER; note = 2'-O-methyladenosine-3'-phosphate
  modified_base 21: mod_base = OTHER; note = 2'-O-methyladenosine-3'-phosphate conjugated at the 3'-end to an L96 ligand
gaatgtgaaagtcatcgacaa

SEQ ID NO: 641 - RNA, 21 nt, synthetic construct
  source 1..21: mol_type = other RNA
  modified_base 1: mod_base = OTHER; note = 2'-O-methylguanosine-3'-phosphorothioate
  modified_base 2: mod_base = OTHER; note = 2'-O-methyladenosine-3'-phosphorothioate
  modified_base 3: mod_base = OTHER; note = 2'-O-methyladenosine-3'-phosphate
  modified_base 4: mod_base = OTHER; note = 2'-O-methyluridine-3'-phosphate
  modified_base 5: mod_base = OTHER; note = 2'-O-methylguanosine-3'-phosphate
  modified_base 6: mod_base = OTHER; note = 2'-O-methyluridine-3'-phosphate
  modified_base 7: mod_base = OTHER; note = 2'-deoxy-2'-fluoroguanosine-3'-phosphate
  modified_base 8: mod_base = OTHER; note = 2'-O-methyladenosine-3'-phosphate
  modified_base 9: mod_base = OTHER; note = 2'-O-methyladenosine-3'-phosphate
  modified_base 10: mod_base = OTHER; note = 2'-deoxy-2'-fluoroadenosine-3'-phosphate
  modified_base 11: mod_base = OTHER; note = 2'-deoxy-2'-fluoroguanosine-3'-phosphate
  modified_base 12: mod_base = OTHER; note = 2'-O-methyluridine-3'-phosphate
  modified_base 13: mod_base = OTHER; note = 2'-O-methylcytidine-3'-phosphate
  modified_base 14: mod_base = OTHER; note = 2'-O-methyladenosine-3'-phosphate
  modified_base 15: mod_base = OTHER; note = 2'-O-methyluridine-3'-phosphate
  modified_base 16: mod_base = OTHER; note = 2'-O-methylcytidine-3'-phosphate
  modified_base 17: mod_base = OTHER; note = 2'-O-methylguanosine-3'-phosphate
  modified_base 18: mod_base = OTHER; note = 2'-O-methyladenosine-3'-phosphate
  modified_base 19: mod_base = OTHER; note = 2'-O-methylcytidine-3'-phosphate
  modified_base 20: mod_base = OTHER; note = 2'-O-methyladenosine-3'-phosphate
  modified_base 21: mod_base = OTHER; note = 2'-O-methyladenosine-3'-phosphate conjugated at the 3'-end to an L96 ligand
gaatgtgaaagtcatcgacaa

SEQ ID NO: 642 - RNA, 21 nt, synthetic construct
  source 1..21: mol_type = other RNA
  modified_base 1: mod_base = OTHER; note = 2'-O-methylguanosine-3'-phosphorothioate
  modified_base 2: mod_base = OTHER; note = 2'-O-methyladenosine-3'-phosphorothioate
  modified_base 3: mod_base = OTHER; note = 2'-O-methyladenosine-3'-phosphate
  modified_base 4: mod_base = OTHER; note = 2'-O-methyluridine-3'-phosphate
  modified_base 5: mod_base = OTHER; note = 2'-O-methylguanosine-3'-phosphate
  modified_base 6: mod_base = OTHER; note = 2'-O-methyluridine-3'-phosphate
  modified_base 7: mod_base = OTHER; note = 2'-deoxy-2'-fluoroguanosine-3'-phosphate
  modified_base 8: mod_base = OTHER; note = 2'-O-methyladenosine-3'-phosphate
  modified_base 9: mod_base = OTHER; note = 2'-O-methyladenosine-3'-phosphate
  modified_base 10: mod_base = OTHER; note = 2'-deoxy-2'-fluoroadenosine-3'-phosphate
  modified_base 11: mod_base = OTHER; note = 2'-deoxy-2'-fluoroguanosine-3'-phosphate
  modified_base 12: mod_base = OTHER; note = 2'-O-methyluridine-3'-phosphate
  modified_base 13: mod_base = OTHER; note = 2'-O-methylcytidine-3'-phosphate
  modified_base 14: mod_base = OTHER; note = 2'-O-methyladenosine-3'-phosphate
  modified_base 15: mod_base = OTHER; note = 2'-O-methyluridine-3'-phosphate
  modified_base 16: mod_base = OTHER; note = 2'-O-methylcytidine-3'-phosphate
  modified_base 17: mod_base = OTHER; note = 2'-O-methylguanosine-3'-phosphate
  modified_base 18: mod_base = OTHER; note = 2'-O-methyladenosine-3'-phosphate
  modified_base 19: mod_base = OTHER; note = 2'-O-methylcytidine-3'-phosphate
  modified_base 20: mod_base = OTHER; note = 2'-O-methyladenosine-3'-phosphate
  modified_base 21: mod_base = OTHER; note = 2'-O-methyladenosine-3'-phosphate conjugated at the 3'-end to an L96 ligand
gaatgtgaaagtcatcgacaa

SEQ ID NO: 643 - RNA, 21 nt, synthetic construct
  source 1..21: mol_type = other RNA
  modified_base 1: mod_base = OTHER; note = 2'-O-methylguanosine-3'-phosphorothioate
  modified_base 2: mod_base = OTHER; note = 2'-O-methyladenosine-3'-phosphorothioate
  modified_base 3: mod_base = OTHER; note = 2'-O-methyladenosine-3'-phosphate
  modified_base 4: mod_base = OTHER; note = 2'-O-methyluridine-3'-phosphate
  modified_base 5: mod_base = OTHER; note = 2'-O-methylguanosine-3'-phosphate
  modified_base 6: mod_base = OTHER; note = 2'-O-methyluridine-3'-phosphate
  modified_base 7: mod_base = OTHER; note = 2'-deoxy-2'-fluoroguanosine-3'-phosphate
  modified_base 8: mod_base = OTHER; note = 2'-O-methyladenosine-3'-phosphate
  modified_base 9: mod_base = OTHER; note = 2'-O-methyladenosine-3'-phosphate
  modified_base 10: mod_base = OTHER; note = 2'-deoxy-2'-fluoroadenosine-3'-phosphate
  modified_base 11: mod_base = OTHER; note = 2'-deoxy-2'-fluoroguanosine-3'-phosphate
  modified_base 12: mod_base = OTHER; note = 2'-O-methyluridine-3'-phosphate
  modified_base 13: mod_base = OTHER; note = 2'-O-methylcytidine-3'-phosphate
  modified_base 14: mod_base = OTHER; note = 2'-O-methyladenosine-3'-phosphate
  modified_base 15: mod_base = OTHER; note = 2'-O-methyluridine-3'-phosphate
  modified_base 16: mod_base = OTHER; note = 2'-O-methylcytidine-3'-phosphate
  modified_base 17: mod_base = OTHER; note = 2'-O-methylguanosine-3'-phosphate
  modified_base 18: mod_base = OTHER; note = 2'-O-methyladenosine-3'-phosphate
  modified_base 19: mod_base = OTHER; note = 2'-O-methylcytidine-3'-phosphate
  modified_base 20: mod_base = OTHER; note = 2'-O-methyladenosine-3'-phosphate
  modified_base 21: mod_base = OTHER; note = 2'-O-methyladenosine-3'-phosphate conjugated at the 3'-end to an L96 ligand
gaatgtgaaagtcatcgacaa

SEQ ID NO: 644 - RNA, 21 nt, synthetic construct
  source 1..21: mol_type = other RNA
  modified_base 1: mod_base = OTHER; note = 2'-O-methylguanosine-3'-phosphorothioate
  modified_base 2: mod_base = OTHER; note = 2'-O-methyladenosine-3'-phosphorothioate
  modified_base 3: mod_base = OTHER; note = 2'-O-methyladenosine-3'-phosphate
  modified_base 4: mod_base = OTHER; note = 2'-O-methyluridine-3'-phosphate
  modified_base 5: mod_base = OTHER; note = 2'-O-methylguanosine-3'-phosphate
  modified_base 6: mod_base = OTHER; note = 2'-O-methyluridine-3'-phosphate
  modified_base 7: mod_base = OTHER; note = 2'-deoxy-2'-fluoroguanosine-3'-phosphate
  modified_base 8: mod_base = OTHER; note = 2'-O-methyladenosine-3'-phosphate
  modified_base 9: mod_base = OTHER; note = 2'-O-methyladenosine-3'-phosphate
  modified_base 10: mod_base = OTHER; note = 2'-deoxy-2'-fluoroadenosine-3'-phosphate
  modified_base 11: mod_base = OTHER; note = 2'-deoxy-2'-fluoroguanosine-3'-phosphate
  modified_base 12: mod_base = OTHER; note = 2'-O-methyluridine-3'-phosphate
  modified_base 13: mod_base = OTHER; note = 2'-O-methylcytidine-3'-phosphate
  modified_base 14: mod_base = OTHER; note = 2'-O-methyladenosine-3'-phosphate
  modified_base 15: mod_base = OTHER; note = 2'-O-methyluridine-3'-phosphate
  modified_base 16: mod_base = OTHER; note = 2'-O-methylcytidine-3'-phosphate
  modified_base 17: mod_base = OTHER; note = 2'-O-methylguanosine-3'-phosphate
  modified_base 18: mod_base = OTHER; note = 2'-O-methyladenosine-3'-phosphate
  modified_base 19: mod_base = OTHER; note = 2'-O-methylcytidine-3'-phosphate
  modified_base 20: mod_base = OTHER; note = 2'-O-methyladenosine-3'-phosphate
  modified_base 21: mod_base = OTHER; note = 2'-O-methyladenosine-3'-phosphate conjugated at the 3'-end to an L96 ligand
gaatgtgaaagtcatcgacaa

SEQ ID NO: 645 - RNA, 21 nt, synthetic construct
  source 1..21: mol_type = other RNA
  modified_base 1: mod_base = OTHER; note = 2'-O-methylguanosine-3'-phosphorothioate
  modified_base 2: mod_base = OTHER; note = 2'-O-methyladenosine-3'-phosphorothioate
  modified_base 3: mod_base = OTHER; note = 2'-O-methyladenosine-3'-phosphate
  modified_base 4: mod_base = OTHER; note = 2'-O-methyluridine-3'-phosphate
  modified_base 5: mod_base = OTHER; note = 2'-O-methylguanosine-3'-phosphate
  modified_base 6: mod_base = OTHER; note = 2'-O-methyluridine-3'-phosphate
  modified_base 7: mod_base = OTHER; note = 2'-deoxy-2'-fluoroguanosine-3'-phosphate
  modified_base 8: mod_base = OTHER; note = 2'-O-methyladenosine-3'-phosphate
  modified_base 9: mod_base = OTHER; note = 2'-O-methyladenosine-3'-phosphate
  modified_base 10: mod_base = OTHER; note = 2'-deoxy-2'-fluoroadenosine-3'-phosphate
  modified_base 11: mod_base = OTHER; note = 2'-deoxy-2'-fluoroguanosine-3'-phosphate
  modified_base 12: mod_base = OTHER; note = 2'-O-methyluridine-3'-phosphate
  modified_base 13: mod_base = OTHER; note = 2'-O-methylcytidine-3'-phosphate
  modified_base 14: mod_base = OTHER; note = 2'-O-methyladenosine-3'-phosphate
  modified_base 15: mod_base = OTHER; note = 2'-O-methyluridine-3'-phosphate
  modified_base 16: mod_base = OTHER; note = 2'-O-methylcytidine-3'-phosphate
  modified_base 17: mod_base = OTHER; note = 2'-O-methylguanosine-3'-phosphate
  modified_base 18: mod_base = OTHER; note = 2'-O-methyladenosine-3'-phosphate
  modified_base 19: mod_base = OTHER; note = 2'-O-methylcytidine-3'-phosphate
  modified_base 20: mod_base = OTHER; note = 2'-O-methyladenosine-3'-phosphate
  modified_base 21: mod_base = OTHER; note = 2'-O-methyladenosine-3'-phosphate conjugated at the 3'-end to an L96 ligand
gaatgtgaaagtcatcgacaa

SEQ ID NO: 646 - RNA, 21 nt, synthetic construct
  source 1..21: mol_type = other RNA
  modified_base 1: mod_base = OTHER; note = 2'-O-methylguanosine-3'-phosphorothioate
  modified_base 2: mod_base = OTHER; note = 2'-O-methyladenosine-3'-phosphorothioate
  modified_base 3: mod_base = OTHER; note = 2'-O-methyladenosine-3'-phosphate
  modified_base 4: mod_base = OTHER; note = 2'-O-methyluridine-3'-phosphate
  modified_base 5: mod_base = OTHER; note = 2'-O-methylguanosine-3'-phosphate
  modified_base 6: mod_base = OTHER; note = 2'-O-methyluridine-3'-phosphate
  modified_base 7: mod_base = OTHER; note = 2'-deoxy-2'-fluoroguanosine-3'-phosphate
  modified_base 8: mod_base = OTHER; note = 2'-O-methyladenosine-3'-phosphate
  modified_base 9: mod_base = OTHER; note = 2'-O-methyladenosine-3'-phosphate
  modified_base 10: mod_base = OTHER; note = 2'-deoxy-2'-fluoroadenosine-3'-phosphate
  modified_base 11: mod_base = OTHER; note = 2'-deoxy-2'-fluoroguanosine-3'-phosphate
  modified_base 12: mod_base = OTHER; note = 2'-O-methyluridine-3'-phosphate
  modified_base 13: mod_base = OTHER; note = 2'-O-methylcytidine-3'-phosphate
  modified_base 14: mod_base = OTHER; note = 2'-O-methyladenosine-3'-phosphate
  modified_base 15: mod_base = OTHER; note = 2'-O-methyluridine-3'-phosphate
  modified_base 16: mod_base = OTHER; note = 2'-O-methylcytidine-3'-phosphate
  modified_base 17: mod_base = OTHER; note = 2'-O-methylguanosine-3'-phosphate
  modified_base 18: mod_base = OTHER; note = 2'-O-methyladenosine-3'-phosphate
  modified_base 19: mod_base = OTHER; note = 2'-O-methylcytidine-3'-phosphate
  modified_base 20: mod_base = OTHER; note = 2'-O-methyladenosine-3'-phosphate
  modified_base 21: mod_base = OTHER; note = 2'-O-methyladenosine-3'-phosphate conjugated at the 3'-end to an L96 ligand
gaatgtgaaagtcatcgacaa

SEQ ID NO: 647 - RNA, 21 nt, synthetic construct
  source 1..21: mol_type = other RNA
  modified_base 1: mod_base = OTHER; note = 2'-O-methylguanosine-3'-phosphorothioate
  modified_base 2: mod_base = OTHER; note = 2'-O-methyladenosine-3'-phosphorothioate
  modified_base 3: mod_base = OTHER; note = 2'-O-methyladenosine-3'-phosphate
  modified_base 4: mod_base = OTHER; note = 2'-O-methyluridine-3'-phosphate
  modified_base 5: mod_base = OTHER; note = 2'-O-methylguanosine-3'-phosphate
  modified_base 6: mod_base = OTHER; note = 2'-O-methyluridine-3'-phosphate
  modified_base 7: mod_base = OTHER; note = 2'-deoxy-2'-fluoroguanosine-3'-phosphate
  modified_base 8: mod_base = OTHER; note = 2'-O-methyladenosine-3'-phosphate
  modified_base 9: mod_base = OTHER; note = 2'-O-methyladenosine-3'-phosphate
  modified_base 10: mod_base = OTHER; note = 2'-deoxy-2'-fluoroadenosine-3'-phosphate
  modified_base 11: mod_base = OTHER; note = 2'-deoxy-2'-fluoroguanosine-3'-phosphate
  modified_base 12: mod_base = OTHER; note = 2'-O-methyluridine-3'-phosphate
  modified_base 13: mod_base = OTHER; note = 2'-O-methylcytidine-3'-phosphate
  modified_base 14: mod_base = OTHER; note = 2'-O-methyladenosine-3'-phosphate
  modified_base 15: mod_base = OTHER; note = 2'-O-methyluridine-3'-phosphate
  modified_base 16: mod_base = OTHER; note = 2'-O-methylcytidine-3'-phosphate
  modified_base 17: mod_base = OTHER; note = 2'-O-methylguanosine-3'-phosphate
  modified_base 18: mod_base = OTHER; note = 2'-O-methyladenosine-3'-phosphate
  modified_base 19: mod_base = OTHER; note = 2'-O-methylcytidine-3'-phosphate
  modified_base 20: mod_base = OTHER; note = 2'-O-methyladenosine-3'-phosphate
  modified_base 21: mod_base = OTHER; note = 2'-O-methyladenosine-3'-phosphate conjugated at the 3'-end to an L96 ligand
gaatgtgaaagtcatcgacaa

SEQ ID NO: 648 - RNA, 21 nt, synthetic construct
  source 1..21: mol_type = other RNA
  modified_base 1: mod_base = OTHER; note = 2'-O-methylguanosine-3'-phosphorothioate
  modified_base 2: mod_base = OTHER; note = 2'-O-methyladenosine-3'-phosphorothioate
  modified_base 3: mod_base = OTHER; note = 2'-O-methyladenosine-3'-phosphate
  modified_base 4: mod_base = OTHER; note = 2'-O-methyluridine-3'-phosphate
  modified_base 5: mod_base = OTHER; note = 2'-O-methylguanosine-3'-phosphate
  modified_base 6: mod_base = OTHER; note = 2'-O-methyluridine-3'-phosphate
  modified_base 7: mod_base = OTHER; note = 2'-deoxy-2'-fluoroguanosine-3'-phosphate
  modified_base 8: mod_base = OTHER; note = 2'-O-methyladenosine-3'-phosphate
  modified_base 9: mod_base = OTHER; note = 2'-O-methyladenosine-3'-phosphate
  modified_base 10: mod_base = OTHER; note = 2'-deoxy-2'-fluoroadenosine-3'-phosphate
  modified_base 11: mod_base = OTHER; note = 2'-deoxy-2'-fluoroguanosine-3'-phosphate
  modified_base 12: mod_base = OTHER; note = 2'-O-methyluridine-3'-phosphate
  modified_base 13: mod_base = OTHER; note = 2'-O-methylcytidine-3'-phosphate
  modified_base 14: mod_base = OTHER; note = 2'-O-methyladenosine-3'-phosphate
  modified_base 15: mod_base = OTHER; note = 2'-O-methyluridine-3'-phosphate
  modified_base 16: mod_base = OTHER; note = 2'-O-methylcytidine-3'-phosphate
  modified_base 17: mod_base = OTHER; note = 2'-O-methylguanosine-3'-phosphate
  modified_base 18: mod_base = OTHER; note = 2'-O-methyladenosine-3'-phosphate
  modified_base 19: mod_base = OTHER; note = 2'-O-methylcytidine-3'-phosphate
  modified_base 20: mod_base = OTHER; note = 2'-O-methyladenosine-3'-phosphate
  modified_base 21: mod_base = OTHER; note = 2'-O-methyladenosine-3'-phosphate conjugated at the 3'-end to an L96 ligand
gaatgtgaaagtcatcgacaa

SEQ ID NO: 649 - RNA, 21 nt, synthetic construct
  source 1..21: mol_type = other RNA
  modified_base 1: mod_base = OTHER; note = 2'-O-methylguanosine-3'-phosphorothioate
  modified_base 2: mod_base = OTHER; note = 2'-O-methyladenosine-3'-phosphorothioate
  modified_base 3: mod_base = OTHER; note = 2'-O-methyladenosine-3'-phosphate
  modified_base 4: mod_base = OTHER; note = 2'-O-methyluridine-3'-phosphate
  modified_base 5: mod_base = OTHER; note = 2'-O-methylguanosine-3'-phosphate
  modified_base 6: mod_base = OTHER; note = 2'-O-methyluridine-3'-phosphate
  modified_base 7: mod_base = OTHER; note = 2'-deoxy-2'-fluoroguanosine-3'-phosphate
  modified_base 8: mod_base = OTHER; note = 2'-O-methyladenosine-3'-phosphate
  modified_base 9: mod_base = OTHER; note = 2'-O-methyladenosine-3'-phosphate
  modified_base 10: mod_base = OTHER; note = 2'-deoxy-2'-fluoroadenosine-3'-phosphate
  modified_base 11: mod_base = OTHER; note = 2'-deoxy-2'-fluoroguanosine-3'-phosphate
  modified_base 12: mod_base = OTHER; note = 2'-O-methyluridine-3'-phosphate
  modified_base 13: mod_base = OTHER; note = 2'-O-methylcytidine-3'-phosphate
  modified_base 14: mod_base = OTHER; note = 2'-O-methyladenosine-3'-phosphate
  modified_base 15: mod_base = OTHER; note = 2'-O-methyluridine-3'-phosphate
  modified_base 16: mod_base = OTHER; note = 2'-O-methylcytidine-3'-phosphate
  modified_base 17: mod_base = OTHER; note = 2'-O-methylguanosine-3'-phosphate
  modified_base 18: mod_base = OTHER; note = 2'-O-methyladenosine-3'-phosphate
  modified_base 19: mod_base = OTHER; note = 2'-O-methylcytidine-3'-phosphate
  modified_base 20: mod_base = OTHER; note = 2'-O-methyladenosine-3'-phosphate
  modified_base 21: mod_base = OTHER; note = 2'-O-methyladenosine-3'-phosphate conjugated at the 3'-end to an L96 ligand
gaatgtgaaagtcatcgacaa

SEQ ID NO: 650 - RNA, 21 nt, synthetic construct
  source 1..21: mol_type = other RNA
  modified_base 1: mod_base = OTHER; note = 2'-O-methylguanosine-3'-phosphorothioate
  modified_base 2: mod_base = OTHER; note = 2'-O-methyladenosine-3'-phosphorothioate
  modified_base 3: mod_base = OTHER; note = 2'-O-methyladenosine-3'-phosphate
  modified_base 4: mod_base = OTHER; note = 2'-O-methyluridine-3'-phosphate
  modified_base 5: mod_base = OTHER; note = 2'-O-methylguanosine-3'-phosphate
  modified_base 6: mod_base = OTHER; note = 2'-O-methyluridine-3'-phosphate
  modified_base 7: mod_base = OTHER; note = 2'-deoxy-2'-fluoroguanosine-3'-phosphate
  modified_base 8: mod_base = OTHER; note = 2'-O-methyladenosine-3'-phosphate
  modified_base 9: mod_base = OTHER; note = 2'-O-methyladenosine-3'-phosphate
  modified_base 10: mod_base = OTHER; note = 2'-deoxy-2'-fluoroadenosine-3'-phosphate
  modified_base 11: mod_base = OTHER; note = 2'-deoxy-2'-fluoroguanosine-3'-phosphate
  modified_base 12: mod_base = OTHER; note = 2'-O-methyluridine-3'-phosphate
  modified_base 13: mod_base = OTHER; note = 2'-O-methylcytidine-3'-phosphate
  modified_base 14: mod_base = OTHER; note = 2'-O-methyladenosine-3'-phosphate
  modified_base 15: mod_base = OTHER; note = 2'-O-methyluridine-3'-phosphate
  modified_base 16: mod_base = OTHER; note = 2'-O-methylcytidine-3'-phosphate
  modified_base 17: mod_base = OTHER; note = 2'-O-methylguanosine-3'-phosphate
  modified_base 18: mod_base = OTHER; note = 2'-O-methyladenosine-3'-phosphate
  modified_base 19: mod_base = OTHER; note = 2'-O-methylcytidine-3'-phosphate
  modified_base 20: mod_base = OTHER; note = 2'-O-methyladenosine-3'-phosphate
  modified_base 21: mod_base = OTHER; note = 2'-O-methyladenosine-3'-phosphate conjugated at the 3'-end to an L96 ligand
gaatgtgaaagtcatcgacaa

SEQ ID NO: 651 - RNA, 21 nt, synthetic construct
  source 1..21: mol_type = other RNA
  modified_base 1: mod_base = OTHER; note = 2'-O-methylguanosine-3'-phosphorothioate
  modified_base 2: mod_base = OTHER; note = 2'-O-methyladenosine-3'-phosphorothioate
  modified_base 3: mod_base = OTHER; note = 2'-O-methyladenosine-3'-phosphate
  modified_base 4: mod_base = OTHER; note = 2'-O-methyluridine-3'-phosphate
  modified_base 5: mod_base = OTHER; note = 2'-O-methylguanosine-3'-phosphate
  modified_base 6: mod_base = OTHER; note = 2'-O-methyluridine-3'-phosphate
  modified_base 7: mod_base = OTHER; note = 2'-deoxy-2'-fluoroguanosine-3'-phosphate
  modified_base 8: mod_base = OTHER; note = 2'-O-methyladenosine-3'-phosphate
  modified_base 9: mod_base = OTHER; note = 2'-O-methyladenosine-3'-phosphate
  modified_base 10: mod_base = OTHER; note = 2'-deoxy-2'-fluoroadenosine-3'-phosphate
  modified_base 11: mod_base = OTHER; note = 2'-deoxy-2'-fluoroguanosine-3'-phosphate
  modified_base 12: mod_base = OTHER; note = 2'-O-methyluridine-3'-phosphate
  modified_base 13: mod_base = OTHER; note = 2'-O-methylcytidine-3'-phosphate
  modified_base 14: mod_base = OTHER; note = 2'-O-methyladenosine-3'-phosphate
  modified_base 15: mod_base = OTHER; note = 2'-O-methyluridine-3'-phosphate
  modified_base 16: mod_base = OTHER; note = 2'-O-methylcytidine-3'-phosphate
  modified_base 17: mod_base = OTHER; note = 2'-O-methylguanosine-3'-phosphate
  modified_base 18: mod_base = OTHER; note = 2'-O-methyladenosine-3'-phosphate
  modified_base 19: mod_base = OTHER; note = 2'-O-methylcytidine-3'-phosphate
  modified_base 20: mod_base = OTHER; note = 2'-O-methyladenosine-3'-phosphate
  modified_base 21: mod_base = OTHER; note = 2'-O-methyladenosine-3'-phosphate conjugated at the 3'-end to an L96 ligand
gaatgtgaaagtcatcgacaa

SEQ ID NO: 652 - RNA, 23 nt, synthetic construct
  source 1..23: mol_type = other RNA
  modified_base 1: mod_base = OTHER; note = 2'-O-methyluridine-3'-phosphorothioate
  modified_base 2: mod_base = OTHER; note = 2'-deoxy-2'-fluorouridine-3'-phosphorothioate
  modified_base 3: mod_base = OTHER; note = 2'-O-methylguanosine-3'-phosphate
  modified_base 4: mod_base = OTHER; note = 2'-O-methyluridine-3'-phosphate
  modified_base 5: mod_base = OTHER; note = 2'-O-methylcytidine-3'-phosphate
  modified_base 6: mod_base = OTHER; note = 2'-deoxy-2'-fluoroguanosine-3'-phosphate
  modified_base 7: mod_base = OTHER; note = 2'-O-methyladenosine-3'-phosphate
  modified_base 8: mod_base = OTHER; note = 2'-deoxy-2'-fluorouridine-3'-phosphate
  modified_base 9: mod_base = OTHER; note = 2'-deoxy-2'-fluoroguanosine-3'-phosphate
  modified_base 10: mod_base = OTHER; note = 2'-O-methyladenosine-3'-phosphate
  modified_base 11: mod_base = OTHER; note = 2'-O-methylcytidine-3'-phosphate
  modified_base 12: mod_base = OTHER; note = 2'-O-methyluridine-3'-phosphate
  modified_base 13: mod_base = OTHER; note = 2'-O-methyluridine-3'-phosphate
  modified_base 14: mod_base = OTHER; note = 2'-deoxy-2'-fluorouridine-3'-phosphate
  modified_base 15: mod_base = OTHER; note = 2'-O-methylcytidine-3'-phosphate
  modified_base 16: mod_base = OTHER; note = 2'-deoxy-2'-fluoroadenosine-3'-phosphate
  modified_base 17: mod_base = OTHER; note = 2'-O-methylcytidine-3'-phosphate
  modified_base 18: mod_base = OTHER; note = 2'-O-methyladenosine-3'-phosphate
  modified_base 19: mod_base = OTHER; note = 2'-O-methyluridine-3'-phosphate
  modified_base 20: mod_base = OTHER; note = 2'-O-methyluridine-3'-phosphate
  modified_base 21: mod_base = OTHER; note = 2'-O-methylcytidine-3'-phosphorothioate
  modified_base 22: mod_base = OTHER; note = 2'-O-methyluridine-3'-phosphorothioate
  modified_base 23: mod_base = OTHER; note = 2'-O-methylguanosine
ttgtcgatgactttcacattctg

SEQ ID NO: 653 - RNA, 23 nt, synthetic construct
  source 1..23: mol_type = other RNA
  modified_base 1: mod_base = OTHER; note = 2'-O-methyluridine-3'-phosphorothioate
  modified_base 2: mod_base = OTHER; note = 2'-deoxy-2'-fluorouridine-3'-phosphorothioate
  modified_base 3: mod_base = OTHER; note (2S,4R)-N-acetyl-2-hydroxymethyl-4-hydroxypyrrolidine 4-phosphate
  modified_base 4: mod_base = OTHER; note = 2'-O-methyluridine-3'-phosphate
  modified_base 5: mod_base = OTHER; note = 2'-O-methylcytidine-3'-phosphate
  modified_base 6: mod_base = OTHER; note = 2'-deoxy-2'-fluoroguanosine-3'-phosphate
  modified_base 7: mod_base = OTHER; note = 2'-O-methyladenosine-3'-phosphate
  modified_base 8: mod_base = OTHER; note = 2'-deoxy-2'-fluorouridine-3'-phosphate
  modified_base 9: mod_base = OTHER; note = 2'-deoxy-2'-fluoroguanosine-3'-phosphate
  modified_base 10: mod_base = OTHER; note = 2'-O-methyladenosine-3'-phosphate
  modified_base 11: mod_base = OTHER; note = 2'-O-methylcytidine-3'-phosphate
  modified_base 12: mod_base = OTHER; note = 2'-O-methyluridine-3'-phosphate
  modified_base 13: mod_base = OTHER; note = 2'-O-methyluridine-3'-phosphate
  modified_base 14: mod_base = OTHER; note = 2'-deoxy-2'-fluorouridine-3'-phosphate
  modified_base 15: mod_base = OTHER; note = 2'-O-methylcytidine-3'-phosphate
  modified_base 16: mod_base = OTHER; note = 2'-deoxy-2'-fluoroadenosine-3'-phosphate
  modified_base 17: mod_base = OTHER; note = 2'-O-methylcytidine-3'-phosphate
  modified_base 18: mod_base = OTHER; note = 2'-O-methyladenosine-3'-phosphate
  modified_base 19: mod_base = OTHER; note = 2'-O-methyluridine-3'-phosphate
  modified_base 20: mod_base = OTHER; note = 2'-O-methyluridine-3'-phosphate
  modified_base 21: mod_base = OTHER; note = 2'-O-methylcytidine-3'-phosphorothioate
  modified_base 22: mod_base = OTHER; note = 2'-O-methyluridine-3'-phosphorothioate
  modified_base 23: mod_base = OTHER; note = 2'-O-methylguanosine
ttntcgatgactttcacattctg

SEQ ID NO: 654 - RNA, 23 nt, synthetic construct
  source 1..23: mol_type = other RNA
  modified_base 1: mod_base = OTHER; note = 2'-O-methyluridine-3'-phosphorothioate
  modified_base 2: mod_base = OTHER; note = 2'-deoxy-2'-fluorouridine-3'-phosphorothioate
  modified_base 3: mod_base = OTHER; note (2S,4R)-N-(2-(guanin-9-yl)-1-oxoethyl)-2-hydroxymethyl-4-hy droxypyrrolidine 4-phosphate
  modified_base 4: mod_base = OTHER; note = 2'-O-methyluridine-3'-phosphate
  modified_base 5: mod_base = OTHER; note = 2'-O-methylcytidine-3'-phosphate
  modified_base 6: mod_base = OTHER; note = 2'-deoxy-2'-fluoroguanosine-3'-phosphate
  modified_base 7: mod_base = OTHER; note = 2'-O-methyladenosine-3'-phosphate
  modified_base 8: mod_base = OTHER; note = 2'-deoxy-2'-fluorouridine-3'-phosphate
  modified_base 9: mod_base = OTHER; note = 2'-deoxy-2'-fluoroguanosine-3'-phosphate
  modified_base 10: mod_base = OTHER; note = 2'-O-methyladenosine-3'-phosphate
  modified_base 11: mod_base = OTHER; note = 2'-O-methylcytidine-3'-phosphate
  modified_base 12: mod_base = OTHER; note = 2'-O-methyluridine-3'-phosphate
  modified_base 13: mod_base = OTHER; note = 2'-O-methyluridine-3'-phosphate
  modified_base 14: mod_base = OTHER; note = 2'-deoxy-2'-fluorouridine-3'-phosphate
  modified_base 15: mod_base = OTHER; note = 2'-O-methylcytidine-3'-phosphate
  modified_base 16: mod_base = OTHER; note = 2'-deoxy-2'-fluoroadenosine-3'-phosphate
  modified_base 17: mod_base = OTHER; note = 2'-O-methylcytidine-3'-phosphate
  modified_base 18: mod_base = OTHER; note = 2'-O-methyladenosine-3'-phosphate
  modified_base 19: mod_base = OTHER; note = 2'-O-methyluridine-3'-phosphate
  modified_base 20: mod_base = OTHER; note = 2'-O-methyluridine-3'-phosphate
  modified_base 21: mod_base = OTHER; note = 2'-O-methylcytidine-3'-phosphorothioate
  modified_base 22: mod_base = OTHER; note = 2'-O-methyluridine-3'-phosphorothioate
  modified_base 23: mod_base = OTHER; note = 2'-O-methylguanosine
ttgtcgatgactttcacattctg

SEQ ID NO: 655 - RNA, 23 nt, synthetic construct
  source 1..23: mol_type = other RNA
  modified_base 1: mod_base = OTHER; note = 2'-O-methyluridine-3'-phosphorothioate
  modified_base 2: mod_base = OTHER; note = 2'-deoxy-2'-fluorouridine-3'-phosphorothioate
  modified_base 3: mod_base = OTHER; note = 2'-O-methylguanosine-3'-phosphate
  modified_base 4: mod_base = OTHER; note (2S,4R)-N-acetyl-2-hydroxymethyl-4-hydroxypyrrolidine 4-phosphate
  modified_base 5: mod_base = OTHER; note = 2'-O-methylcytidine-3'-phosphate
  modified_base 6: mod_base = OTHER; note = 2'-deoxy-2'-fluoroguanosine-3'-phosphate
  modified_base 7: mod_base = OTHER; note = 2'-O-methyladenosine-3'-phosphate
  modified_base 8: mod_base = OTHER; note = 2'-deoxy-2'-fluorouridine-3'-phosphate
  modified_base 9: mod_base = OTHER; note = 2'-deoxy-2'-fluoroguanosine-3'-phosphate
  modified_base 10: mod_base = OTHER; note = 2'-O-methyladenosine-3'-phosphate
  modified_base 11: mod_base = OTHER; note = 2'-O-methylcytidine-3'-phosphate
  modified_base 12: mod_base = OTHER; note = 2'-O-methyluridine-3'-phosphate
  modified_base 13: mod_base = OTHER; note = 2'-O-methyluridine-3'-phosphate
  modified_base 14: mod_base = OTHER; note = 2'-deoxy-2'-fluorouridine-3'-phosphate
  modified_base 15: mod_base = OTHER; note = 2'-O-methylcytidine-3'-phosphate
  modified_base 16: mod_base = OTHER; note = 2'-deoxy-2'-fluoroadenosine-3'-phosphate
  modified_base 17: mod_base = OTHER; note = 2'-O-methylcytidine-3'-phosphate
  modified_base 18: mod_base = OTHER; note = 2'-O-methyladenosine-3'-phosphate
  modified_base 19: mod_base = OTHER; note = 2'-O-methyluridine-3'-phosphate
  modified_base 20: mod_base = OTHER; note = 2'-O-methyluridine-3'-phosphate
  modified_base 21: mod_base = OTHER; note = 2'-O-methylcytidine-3'-phosphorothioate
  modified_base 22: mod_base = OTHER; note = 2'-O-methyluridine-3'-phosphorothioate
  modified_base 23: mod_base = OTHER; note = 2'-O-methylguanosine
ttgncgatgactttcacattctg

SEQ ID NO: 656 - RNA, 23 nt, synthetic construct
  source 1..23: mol_type = other RNA
  modified_base 1: mod_base = OTHER; note = 2'-O-methyluridine-3'-phosphorothioate
  modified_base 2: mod_base = OTHER; note = 2'-deoxy-2'-fluorouridine-3'-phosphorothioate
  modified_base 3: mod_base = OTHER; note = 2'-O-methylguanosine-3'-phosphate
  modified_base 4: mod_base = OTHER; note (2S,4R)-N-(2-(thymin-1-yl)-1-oxoethyl)-2-hydroxymethyl-4-hy droxypyrrolidine 4-phosphate
  modified_base 5: mod_base = OTHER; note = 2'-O-methylcytidine-3'-phosphate
  modified_base 6: mod_base = OTHER; note = 2'-deoxy-2'-fluoroguanosine-3'-phosphate
  modified_base 7: mod_base = OTHER; note = 2'-O-methyladenosine-3'-phosphate
  modified_base 8: mod_base = OTHER; note = 2'-deoxy-2'-fluorouridine-3'-phosphate
  modified_base 9: mod_base = OTHER; note = 2'-deoxy-2'-fluoroguanosine-3'-phosphate
  modified_base 10: mod_base = OTHER; note = 2'-O-methyladenosine-3'-phosphate
  modified_base 11: mod_base = OTHER; note = 2'-O-methylcytidine-3'-phosphate
  modified_base 12: mod_base = OTHER; note = 2'-O-methyluridine-3'-phosphate
  modified_base 13: mod_base = OTHER; note = 2'-O-methyluridine-3'-phosphate
  modified_base 14: mod_base = OTHER; note = 2'-deoxy-2'-fluorouridine-3'-phosphate
  modified_base 15: mod_base = OTHER; note = 2'-O-methylcytidine-3'-phosphate
  modified_base 16: mod_base = OTHER; note = 2'-deoxy-2'-fluoroadenosine-3'-phosphate
  modified_base 17: mod_base = OTHER; note = 2'-O-methylcytidine-3'-phosphate
  modified_base 18: mod_base = OTHER; note = 2'-O-methyladenosine-3'-phosphate
  modified_base 19: mod_base = OTHER; note = 2'-O-methyluridine-3'-phosphate
  modified_base 20: mod_base = OTHER; note = 2'-O-methyluridine-3'-phosphate
  modified_base 21: mod_base = OTHER; note = 2'-O-methylcytidine-3'-phosphorothioate
  modified_base 22: mod_base = OTHER; note = 2'-O-methyluridine-3'-phosphorothioate
  modified_base 23: mod_base = OTHER; note = 2'-O-methylguanosine
ttgtcgatgactttcacattctg

SEQ ID NO: 657 - RNA, 23 nt, synthetic construct
  source 1..23: mol_type = other RNA
  modified_base 1: mod_base = OTHER; note = 2'-O-methyluridine-3'-phosphorothioate
  modified_base 2: mod_base = OTHER; note = 2'-deoxy-2'-fluorouridine-3'-phosphorothioate
  modified_base 3: mod_base = OTHER; note = 2'-O-methylguanosine-3'-phosphate
  modified_base 4: mod_base = OTHER; note = 2'-O-methyluridine-3'-phosphate
  modified_base 5: mod_base = OTHER; note (2S,4R)-N-acetyl-2-hydroxymethyl-4-hydroxypyrrolidine 4-phosphate
  modified_base 6: mod_base = OTHER; note = 2'-deoxy-2'-fluoroguanosine-3'-phosphate
  modified_base 7: mod_base = OTHER; note = 2'-O-methyladenosine-3'-phosphate
  modified_base 8: mod_base = OTHER; note = 2'-deoxy-2'-fluorouridine-3'-phosphate
  modified_base 9: mod_base = OTHER; note = 2'-deoxy-2'-fluoroguanosine-3'-phosphate
  modified_base 10: mod_base = OTHER; note = 2'-O-methyladenosine-3'-phosphate
  modified_base 11: mod_base = OTHER; note = 2'-O-methylcytidine-3'-phosphate
  modified_base 12: mod_base = OTHER; note = 2'-O-methyluridine-3'-phosphate
  modified_base 13: mod_base = OTHER; note = 2'-O-methyluridine-3'-phosphate
  modified_base 14: mod_base = OTHER; note = 2'-deoxy-2'-fluorouridine-3'-phosphate
  modified_base 15: mod_base = OTHER; note = 2'-O-methylcytidine-3'-phosphate
  modified_base 16: mod_base = OTHER; note = 2'-deoxy-2'-fluoroadenosine-3'-phosphate
  modified_base 17: mod_base = OTHER; note = 2'-O-methylcytidine-3'-phosphate
  modified_base 18: mod_base = OTHER; note = 2'-O-methyladenosine-3'-phosphate
  modified_base 19: mod_base = OTHER; note = 2'-O-methyluridine-3'-phosphate
  modified_base 20: mod_base = OTHER; note = 2'-O-methyluridine-3'-phosphate
  modified_base 21: mod_base = OTHER; note = 2'-O-methylcytidine-3'-phosphorothioate
  modified_base 22: mod_base = OTHER; note = 2'-O-methyluridine-3'-phosphorothioate
  modified_base 23: mod_base = OTHER; note = 2'-O-methylguanosine
ttgtngatgactttcacattctg

SEQ ID NO: 658 - RNA, 23 nt, synthetic construct
  source 1..23: mol_type = other RNA
  modified_base 1: mod_base = OTHER; note = 2'-O-methyluridine-3'-phosphorothioate
  modified_base 2: mod_base = OTHER; note = 2'-deoxy-2'-fluorouridine-3'-phosphorothioate
  modified_base 3: mod_base = OTHER; note = 2'-O-methylguanosine-3'-phosphate
  modified_base 4: mod_base = OTHER; note = 2'-O-methyluridine-3'-phosphate
  modified_base 5: mod_base = OTHER; note (2S,4R)-N-(2-(cytosin-1-yl)-1-oxoethyl)-2-hydroxymethyl-4-h ydroxypyrrolidine 4-phosphate
  modified_base 6: mod_base = OTHER; note = 2'-deoxy-2'-fluoroguanosine-3'-phosphate
  modified_base 7: mod_base = OTHER; note = 2'-O-methyladenosine-3'-phosphate
  modified_base 8: mod_base = OTHER; note = 2'-deoxy-2'-fluorouridine-3'-phosphate
  modified_base 9: mod_base = OTHER; note = 2'-deoxy-2'-fluoroguanosine-3'-phosphate
  modified_base 10: mod_base = OTHER; note = 2'-O-methyladenosine-3'-phosphate
  modified_base 11: mod_base = OTHER; note = 2'-O-methylcytidine-3'-phosphate
  modified_base 12: mod_base = OTHER; note = 2'-O-methyluridine-3'-phosphate
  modified_base 13: mod_base = OTHER; note = 2'-O-methyluridine-3'-phosphate
  modified_base 14: mod_base = OTHER; note = 2'-deoxy-2'-fluorouridine-3'-phosphate
  modified_base 15: mod_base = OTHER; note = 2'-O-methylcytidine-3'-phosphate
  modified_base 16: mod_base = OTHER; note = 2'-deoxy-2'-fluoroadenosine-3'-phosphate
  modified_base 17: mod_base = OTHER; note = 2'-O-methylcytidine-3'-phosphate
  modified_base 18: mod_base = OTHER; note = 2'-O-methyladenosine-3'-phosphate
  modified_base 19: mod_base = OTHER; note = 2'-O-methyluridine-3'-phosphate
  modified_base 20: mod_base = OTHER; note = 2'-O-methyluridine-3'-phosphate
  modified_base 21: mod_base = OTHER; note = 2'-O-methylcytidine-3'-phosphorothioate
  modified_base 22: mod_base = OTHER; note = 2'-O-methyluridine-3'-phosphorothioate
  modified_base 23: mod_base = OTHER; note = 2'-O-methylguanosine
ttgtcgatgactttcacattctg

SEQ ID NO: 659 - RNA, 23 nt, synthetic construct
  source 1..23: mol_type = other RNA
  modified_base 1: mod_base = OTHER; note = 2'-O-methyluridine-3'-phosphorothioate
  modified_base 2: mod_base = OTHER; note = 2'-deoxy-2'-fluorouridine-3'-phosphorothioate
  modified_base 3: mod_base = OTHER; note = 2'-O-methylguanosine-3'-phosphate
  modified_base 4: mod_base = OTHER; note = 2'-O-methyluridine-3'-phosphate
  modified_base 5: mod_base = OTHER; note = 2'-O-methylcytidine-3'-phosphate
  modified_base 6: mod_base = OTHER; note (2S,4R)-N-acetyl-2-hydroxymethyl-4-hydroxypyrrolidine 4-phosphate
  modified_base 7: mod_base = OTHER; note = 2'-O-methyladenosine-3'-phosphate
  modified_base 8: mod_base = OTHER; note = 2'-deoxy-2'-fluorouridine-3'-phosphate
  modified_base 9: mod_base = OTHER; note = 2'-deoxy-2'-fluoroguanosine-3'-phosphate
  modified_base 10: mod_base = OTHER; note = 2'-O-methyladenosine-3'-phosphate
  modified_base 11: mod_base = OTHER; note = 2'-O-methylcytidine-3'-phosphate
  modified_base 12: mod_base = OTHER; note = 2'-O-methyluridine-3'-phosphate
  modified_base 13: mod_base = OTHER; note = 2'-O-methyluridine-3'-phosphate
  modified_base 14: mod_base = OTHER; note = 2'-deoxy-2'-fluorouridine-3'-phosphate
  modified_base 15: mod_base = OTHER; note = 2'-O-methylcytidine-3'-phosphate
  modified_base 16: mod_base = OTHER; note = 2'-deoxy-2'-fluoroadenosine-3'-phosphate
  modified_base 17: mod_base = OTHER; note = 2'-O-methylcytidine-3'-phosphate
  modified_base 18: mod_base = OTHER; note = 2'-O-methyladenosine-3'-phosphate
  modified_base 19: mod_base = OTHER; note = 2'-O-methyluridine-3'-phosphate
  modified_base 20: mod_base = OTHER; note = 2'-O-methyluridine-3'-phosphate
  modified_base 21: mod_base = OTHER; note = 2'-O-methylcytidine-3'-phosphorothioate
  modified_base 22: mod_base = OTHER; note = 2'-O-methyluridine-3'-phosphorothioate
  modified_base 23: mod_base = OTHER; note = 2'-O-methylguanosine
ttgtcnatgactttcacattctg

SEQ ID NO: 660 - RNA, 23 nt, synthetic construct
  source 1..23: mol_type = other RNA
  modified_base 1: mod_base = OTHER; note = 2'-O-methyluridine-3'-phosphorothioate
  modified_base 2: mod_base = OTHER; note = 2'-deoxy-2'-fluorouridine-3'-phosphorothioate
  modified_base 3: mod_base = OTHER; note = 2'-O-methylguanosine-3'-phosphate
  modified_base 4: mod_base = OTHER; note = 2'-O-methyluridine-3'-phosphate
  modified_base 5: mod_base = OTHER; note = 2'-O-methylcytidine-3'-phosphate
  modified_base 6: mod_base = OTHER; note (2S,4R)-N-(2-(guanin-9-yl)-1-oxoethyl)-2-hydroxymethyl-4-hy droxypyrrolidine 4-phosphate
  modified_base 7: mod_base = OTHER; note = 2'-O-methyladenosine-3'-phosphate
  modified_base 8: mod_base = OTHER; note = 2'-deoxy-2'-fluorouridine-3'-phosphate
  modified_base 9: mod_base = OTHER; note = 2'-deoxy-2'-fluoroguanosine-3'-phosphate
  modified_base 10: mod_base = OTHER; note = 2'-O-methyladenosine-3'-phosphate
  modified_base 11: mod_base = OTHER; note = 2'-O-methylcytidine-3'-phosphate
  modified_base 12: mod_base = OTHER; note = 2'-O-methyluridine-3'-phosphate
  modified_base 13: mod_base = OTHER; note = 2'-O-methyluridine-3'-phosphate
  modified_base 14: mod_base = OTHER; note = 2'-deoxy-2'-fluorouridine-3'-phosphate
  modified_base 15: mod_base = OTHER; note = 2'-O-methylcytidine-3'-phosphate
  modified_base 16: mod_base = OTHER; note = 2'-deoxy-2'-fluoroadenosine-3'-phosphate
  modified_base 17: mod_base = OTHER; note = 2'-O-methylcytidine-3'-phosphate
  modified_base 18: mod_base = OTHER; note = 2'-O-methyladenosine-3'-phosphate
  modified_base 19: mod_base = OTHER; note = 2'-O-methyluridine-3'-phosphate
  modified_base 20: mod_base = OTHER; note = 2'-O-methyluridine-3'-phosphate
  modified_base 21: mod_base = OTHER; note = 2'-O-methylcytidine-3'-phosphorothioate
  modified_base 22: mod_base = OTHER; note = 2'-O-methyluridine-3'-phosphorothioate
  modified_base 23: mod_base = OTHER; note = 2'-O-methylguanosine
ttgtcgatgactttcacattctg

SEQ ID NO: 661 - RNA, 23 nt, synthetic construct
  source 1..23: mol_type = other RNA
  modified_base 1: mod_base = OTHER; note = 2'-O-methyluridine-3'-phosphorothioate
  modified_base 2: mod_base = OTHER; note = 2'-deoxy-2'-fluorouridine-3'-phosphorothioate
  modified_base 3: mod_base = OTHER; note = 2'-O-methylguanosine-3'-phosphate
  modified_base 4: mod_base = OTHER; note = 2'-O-methyluridine-3'-phosphate
  modified_base 5: mod_base = OTHER; note = 2'-O-methylcytidine-3'-phosphate
  modified_base 6: mod_base = OTHER; note = 2'-deoxy-2'-fluoroguanosine-3'-phosphate
  modified_base 7: mod_base = OTHER; note (2S,4R)-N-acetyl-2-hydroxymethyl-4-hydroxypyrrolidine 4-phosphate
  modified_base 8: mod_base = OTHER; note = 2'-deoxy-2'-fluorouridine-3'-phosphate
  modified_base 9: mod_base = OTHER; note = 2'-deoxy-2'-fluoroguanosine-3'-phosphate
  modified_base 10: mod_base = OTHER; note = 2'-O-methyladenosine-3'-phosphate
  modified_base 11: mod_base = OTHER; note = 2'-O-methylcytidine-3'-phosphate
  modified_base 12: mod_base = OTHER; note = 2'-O-methyluridine-3'-phosphate
  modified_base 13: mod_base = OTHER; note = 2'-O-methyluridine-3'-phosphate
  modified_base 14: mod_base = OTHER; note = 2'-deoxy-2'-fluorouridine-3'-phosphate
  modified_base 15: mod_base = OTHER; note = 2'-O-methylcytidine-3'-phosphate
  modified_base 16: mod_base = OTHER; note = 2'-deoxy-2'-fluoroadenosine-3'-phosphate
  modified_base 17: mod_base = OTHER; note = 2'-O-methylcytidine-3'-phosphate
  modified_base 18: mod_base = OTHER; note = 2'-O-methyladenosine-3'-phosphate
  modified_base 19: mod_base = OTHER; note = 2'-O-methyluridine-3'-phosphate
  modified_base 20: mod_base = OTHER; note = 2'-O-methyluridine-3'-phosphate
  modified_base 21: mod_base = OTHER; note = 2'-O-methylcytidine-3'-phosphorothioate
  modified_base 22: mod_base = OTHER; note = 2'-O-methyluridine-3'-phosphorothioate
  modified_base 23: mod_base = OTHER; note = 2'-O-methylguanosine
ttgtcgntgactttcacattctg

SEQ ID NO: 662 - RNA, 23 nt, synthetic construct
  source 1..23: mol_type = other RNA
  modified_base 1: mod_base = OTHER; note = 2'-O-methyluridine-3'-phosphorothioate
  modified_base 2: mod_base = OTHER; note = 2'-deoxy-2'-fluorouridine-3'-phosphorothioate
  modified_base 3: mod_base = OTHER; note = 2'-O-methylguanosine-3'-phosphate
  modified_base 4: mod_base = OTHER; note = 2'-O-methyluridine-3'-phosphate
  modified_base 5: mod_base = OTHER; note = 2'-O-methylcytidine-3'-phosphate
  modified_base 6: mod_base = OTHER; note = 2'-deoxy-2'-fluoroguanosine-3'-phosphate
  modified_base 7: mod_base = OTHER; note (2S,4R)-N-(2-(adenin-9-yl)-1-oxoethyl)-2-hydroxymethyl-4-hy droxypyrrolidine 4-phosphate
  modified_base 8: mod_base = OTHER; note = 2'-deoxy-2'-fluorouridine-3'-phosphate
  modified_base 9: mod_base = OTHER; note = 2'-deoxy-2'-fluoroguanosine-3'-phosphate
  modified_base 10: mod_base = OTHER; note = 2'-O-methyladenosine-3'-phosphate
  modified_base 11: mod_base = OTHER; note = 2'-O-methylcytidine-3'-phosphate
  modified_base 12: mod_base = OTHER; note = 2'-O-methyluridine-3'-phosphate
  modified_base 13: mod_base = OTHER; note = 2'-O-methyluridine-3'-phosphate
  modified_base 14: mod_base = OTHER; note = 2'-deoxy-2'-fluorouridine-3'-phosphate
  modified_base 15: mod_base = OTHER; note = 2'-O-methylcytidine-3'-phosphate
  modified_base 16: mod_base = OTHER; note = 2'-deoxy-2'-fluoroadenosine-3'-phosphate
  modified_base 17: mod_base = OTHER; note = 2'-O-methylcytidine-3'-phosphate
  modified_base 18: mod_base = OTHER; note = 2'-O-methyladenosine-3'-phosphate
  modified_base 19: mod_base = OTHER; note = 2'-O-methyluridine-3'-phosphate
  modified_base 20: mod_base = OTHER; note = 2'-O-methyluridine-3'-phosphate
  modified_base 21: mod_base = OTHER; note = 2'-O-methylcytidine-3'-phosphorothioate
  modified_base 22: mod_base = OTHER; note = 2'-O-methyluridine-3'-phosphorothioate
  modified_base 23: mod_base = OTHER; note = 2'-O-methylguanosine
ttgtcgatgactttcacattctg

SEQ ID NO: 663 - RNA, 23 nt, synthetic construct
  source 1..23: mol_type = other RNA
  modified_base 1: mod_base = OTHER; note = 2'-O-methyluridine-3'-phosphorothioate
  modified_base 2: mod_base = OTHER; note = 2'-deoxy-2'-fluorouridine-3'-phosphorothioate
  modified_base 3: mod_base = OTHER; note = 2'-O-methylguanosine-3'-phosphate
  modified_base 4: mod_base = OTHER; note = 2'-O-methyluridine-3'-phosphate
  modified_base 5: mod_base = OTHER; note = 2'-O-methylcytidine-3'-phosphate
  modified_base 6: mod_base = OTHER; note = 2'-deoxy-2'-fluoroguanosine-3'-phosphate
  modified_base 7: mod_base = OTHER; note = 2'-O-methyladenosine-3'-phosphate
  modified_base 8: mod_base = OTHER; note (2S,4R)-N-acetyl-2-hydroxymethyl-4-hydroxypyrrolidine 4-phosphate
  modified_base 9: mod_base = OTHER; note = 2'-deoxy-2'-fluoroguanosine-3'-phosphate
  modified_base 10: mod_base = OTHER; note = 2'-O-methyladenosine-3'-phosphate
  modified_base 11: mod_base = OTHER; note = 2'-O-methylcytidine-3'-phosphate
  modified_base 12: mod_base = OTHER; note = 2'-O-methyluridine-3'-phosphate
  modified_base 13: mod_base = OTHER; note = 2'-O-methyluridine-3'-phosphate
  modified_base 14: mod_base = OTHER; note = 2'-deoxy-2'-fluorouridine-3'-phosphate
  modified_base 15: mod_base = OTHER; note = 2'-O-methylcytidine-3'-phosphate
  modified_base 16: mod_base = OTHER; note = 2'-deoxy-2'-fluoroadenosine-3'-phosphate
  modified_base 17: mod_base = OTHER; note = 2'-O-methylcytidine-3'-phosphate
  modified_base 18: mod_base = OTHER; note = 2'-O-methyladenosine-3'-phosphate
  modified_base 19: mod_base = OTHER; note = 2'-O-methyluridine-3'-phosphate
  modified_base 20: mod_base = OTHER; note = 2'-O-methyluridine-3'-phosphate
  modified_base 21: mod_base = OTHER; note = 2'-O-methylcytidine-3'-phosphorothioate
  modified_base 22: mod_base = OTHER; note = 2'-O-methyluridine-3'-phosphorothioate
  modified_base 23: mod_base = OTHER; note = 2'-O-methylguanosine
ttgtcgangactttcacattctg

SEQ ID NO: 664 - RNA, 23 nt, synthetic construct
  source 1..23: mol_type = other RNA
  modified_base 1: mod_base = OTHER; note = 2'-O-methyluridine-3'-phosphorothioate
  modified_base 2: mod_base = OTHER; note = 2'-deoxy-2'-fluorouridine-3'-phosphorothioate
  modified_base 3: mod_base = OTHER; note = 2'-O-methylguanosine-3'-phosphate
  modified_base 4: mod_base = OTHER; note = 2'-O-methyluridine-3'-phosphate
  modified_base 5: mod_base = OTHER; note = 2'-O-methylcytidine-3'-phosphate
  modified_base 6: mod_base = OTHER; note = 2'-deoxy-2'-fluoroguanosine-3'-phosphate
  modified_base 7: mod_base = OTHER; note = 2'-O-methyladenosine-3'-phosphate
  modified_base 8: mod_base = OTHER; note (2S,4R)-N-(2-(thymin-1-yl)-1-oxoethyl)-2-hydroxymethyl-4-hy droxypyrrolidine 4-phosphate
  modified_base 9: mod_base = OTHER; note = 2'-deoxy-2'-fluoroguanosine-3'-phosphate
  modified_base 10: mod_base = OTHER; note = 2'-O-methyladenosine-3'-phosphate
  modified_base 11: mod_base = OTHER; note = 2'-O-methylcytidine-3'-phosphate
  modified_base 12: mod_base = OTHER; note = 2'-O-methyluridine-3'-phosphate
  modified_base 13: mod_base = OTHER; note = 2'-O-methyluridine-3'-phosphate
  modified_base 14: mod_base = OTHER; note = 2'-deoxy-2'-fluorouridine-3'-phosphate
  modified_base 15: mod_base = OTHER; note = 2'-O-methylcytidine-3'-phosphate
  modified_base 16: mod_base = OTHER; note = 2'-deoxy-2'-fluoroadenosine-3'-phosphate
  modified_base 17: mod_base = OTHER; note = 2'-O-methylcytidine-3'-phosphate
  modified_base 18: mod_base = OTHER; note = 2'-O-methyladenosine-3'-phosphate
  modified_base 19: mod_base = OTHER; note = 2'-O-methyluridine-3'-phosphate
  modified_base 20: mod_base = OTHER; note = 2'-O-methyluridine-3'-phosphate
  modified_base 21: mod_base = OTHER; note = 2'-O-methylcytidine-3'-phosphorothioate
  modified_base 22: mod_base = OTHER; note = 2'-O-methyluridine-3'-phosphorothioate
  modified_base 23: mod_base = OTHER; note = 2'-O-methylguanosine
ttgtcgatgactttcacattctg

SEQ ID NO: 665 - RNA, 23 nt, synthetic construct
  source 1..23: mol_type = other RNA
  modified_base 1: mod_base = OTHER; note = 2'-O-methyluridine-3'-phosphorothioate
  modified_base 2: mod_base = OTHER; note = 2'-deoxy-2'-fluorouridine-3'-phosphorothioate
  modified_base 3: mod_base = OTHER; note = 2'-O-methylguanosine-3'-phosphate
  modified_base 4: mod_base = OTHER; note = 2'-O-methyluridine-3'-phosphate
  modified_base 5: mod_base = OTHER; note = 2'-O-methylcytidine-3'-phosphate
  modified_base 6: mod_base = OTHER; note = 2'-deoxy-2'-fluoroguanosine-3'-phosphate
  modified_base 7: mod_base = OTHER; note = 2'-O-methyladenosine-3'-phosphate
  modified_base 8: mod_base = OTHER; note = 2'-deoxy-2'-fluorouridine-3'-phosphate
  modified_base 9: mod_base = OTHER; note (2S,4R)-N-acetyl-2-hydroxymethyl-4-hydroxypyrrolidine 4-phosphate
  modified_base 10: mod_base = OTHER; note = 2'-O-methyladenosine-3'-phosphate
  modified_base 11: mod_base = OTHER; note = 2'-O-methylcytidine-3'-phosphate
  modified_base 12: mod_base = OTHER; note = 2'-O-methyluridine-3'-phosphate
  modified_base 13: mod_base = OTHER; note = 2'-O-methyluridine-3'-phosphate
  modified_base 14: mod_base = OTHER; note = 2'-deoxy-2'-fluorouridine-3'-phosphate
  modified_base 15: mod_base = OTHER; note = 2'-O-methylcytidine-3'-phosphate
  modified_base 16: mod_base = OTHER; note = 2'-deoxy-2'-fluoroadenosine-3'-phosphate
  modified_base 17: mod_base = OTHER; note = 2'-O-methylcytidine-3'-phosphate
  modified_base 18: mod_base = OTHER; note = 2'-O-methyladenosine-3'-phosphate
  modified_base 19: mod_base = OTHER; note = 2'-O-methyluridine-3'-phosphate
  modified_base 20: mod_base = OTHER; note = 2'-O-methyluridine-3'-phosphate
  modified_base 21: mod_base = OTHER; note = 2'-O-methylcytidine-3'-phosphorothioate
  modified_base 22: mod_base = OTHER; note = 2'-O-methyluridine-3'-phosphorothioate
  modified_base 23: mod_base = OTHER; note = 2'-O-methylguanosine
ttgtcgatnactttcacattctg

SEQ ID NO: 666 - RNA, 23 nt, synthetic construct
  source 1..23: mol_type = other RNA
  modified_base 1: mod_base = OTHER; note = 2'-O-methyluridine-3'-phosphorothioate
  modified_base 2: mod_base = OTHER; note = 2'-deoxy-2'-fluorouridine-3'-phosphorothioate
  modified_base 3: mod_base = OTHER; note = 2'-O-methylguanosine-3'-phosphate
  modified_base 4: mod_base = OTHER; note = 2'-O-methyluridine-3'-phosphate
  modified_base 5: mod_base = OTHER; note = 2'-O-methylcytidine-3'-phosphate
  modified_base 6: mod_base = OTHER; note = 2'-deoxy-2'-fluoroguanosine-3'-phosphate
  modified_base 7: mod_base = OTHER; note = 2'-O-methyladenosine-3'-phosphate
  modified_base 8: mod_base = OTHER; note = 2'-deoxy-2'-fluorouridine-3'-phosphate
  modified_base 9: mod_base = OTHER; note (2S,4R)-N-(2-(guanin-9-yl)-1-oxoethyl)-2-hydroxymethyl-4-hy droxypyrrolidine 4-phosphate
  modified_base 10: mod_base = OTHER; note = 2'-O-methyladenosine-3'-phosphate
  modified_base 11: mod_base = OTHER; note = 2'-O-methylcytidine-3'-phosphate
  modified_base 12: mod_base = OTHER; note = 2'-O-methyluridine-3'-phosphate
  modified_base 13: mod_base = OTHER; note = 2'-O-methyluridine-3'-phosphate
  modified_base 14: mod_base = OTHER; note = 2'-deoxy-2'-fluorouridine-3'-phosphate
  modified_base 15: mod_base = OTHER; note = 2'-O-methylcytidine-3'-phosphate
  modified_base 16: mod_base = OTHER; note = 2'-deoxy-2'-fluoroadenosine-3'-phosphate
  modified_base 17: mod_base = OTHER; note = 2'-O-methylcytidine-3'-phosphate
  modified_base 18: mod_base = OTHER; note = 2'-O-methyladenosine-3'-phosphate
  modified_base 19: mod_base = OTHER; note = 2'-O-methyluridine-3'-phosphate
  modified_base 20: mod_base = OTHER; note = 2'-O-methyluridine-3'-phosphate
  modified_base 21: mod_base = OTHER; note = 2'-O-methylcytidine-3'-phosphorothioate
  modified_base 22: mod_base = OTHER; note = 2'-O-methyluridine-3'-phosphorothioate
  modified_base 23: mod_base = OTHER; note = 2'-O-methylguanosine
ttgtcgatgactttcacattctg

SEQ ID NO: 667 - DNA, 20 bp, synthetic construct
  source 1..20: mol_type = other DNA
  modified_base 19: mod_base = OTHER; note = 2'-deoxythymidine-3'-phosphorothioate
tttttttttttttttttttt

SEQ ID NO: 668 - DNA, 20 bp, synthetic construct
  source 1..20: mol_type = other DNA
  modified_base 19: mod_base = OTHER; note = 2'-O-methyluridine-3'-phosphorothioate
  modified_base 20: mod_base = OTHER; note = 2'-O-methyluridine
  misc_feature 19..20: note = RNA
  misc_feature 1..18: note = DNA
tttttttttttttttttttt

SEQ ID NO: 669 - DNA, 20 bp, synthetic construct
  source 1..20: mol_type = other DNA
  modified_base 19: mod_base = OTHER; note = 2'-deoxy-2'-fluorouridine-3'-phosphate
  modified_base 20: mod_base = OTHER; note = 2'-deoxy-2'-fluorouridine
  misc_feature 19..20: note = RNA
  misc_feature 1..18: note = DNA
tttttttttttttttttttt

SEQ ID NO: 670 - DNA, 20 bp, synthetic construct
  source 1..20: mol_type = other DNA
  modified_base 20: mod_base = OTHER; note = 1-deoxy-1-(thymin-1-yl)-alpha-L-threofuranose
  misc_feature 20: note = RNA
  misc_feature 1..19: note = DNA
tttttttttttttttttttt

SEQ ID NO: 671 - DNA, 20 bp, synthetic construct
  source 1..20: mol_type = other DNA
  modified_base 19: mod_base = OTHER; note = 1-deoxy-1-(thymin-1-yl)-alpha-L-threofuranose 2-phosphate
  modified_base 20: mod_base = OTHER; note = 1-deoxy-1-(thymin-1-yl)-alpha-L-threofuranose
  misc_feature 19..20: note = RNA
  misc_feature 1..18: note = DNA
tttttttttttttttttttt

SEQ ID NO: 672 - DNA, 20 bp, synthetic construct
  source 1..20: mol_type = other DNA
  modified_base 1: mod_base = OTHER; note = 2'-deoxythymidine-3'-phosphorothioate
tttttttttttttttttttt

SEQ ID NO: 673 - DNA, 20 bp, synthetic construct
  source 1..20: mol_type = other DNA
  modified_base 1: mod_base = OTHER; note = 1-deoxy-1-(thymin-1-yl)-alpha-L-threofuranose 2-phosphate
  misc_feature 1: note = RNA
  misc_feature 2..20: note = DNA
tttttttttttttttttttt

SEQ ID NO: 674 - DNA, 20 bp, synthetic construct
  source 1..20: mol_type = other DNA
  modified_base 20: mod_base = OTHER; note = unlocked nucelic acid - 2', 3', or 5'-methyl or 4'-methoxy steroisomer
  misc_feature 20: note = RNA
  misc_feature 1..19: note = DNA
tttttttttttttttttttt

SEQ ID NO: 675 - DNA, 20 bp, synthetic construct
  source 1..20: mol_type = other DNA
  modified_base 19: mod_base = OTHER; note = unlocked nucelic acid - 2', 3', or 5'-methyl or 4'-methoxy steroisomer, 3'-phosphate
  misc_feature 19: note = RNA
  misc_feature 1..18: note = DNA
tttttttttttttttttttt

SEQ ID NO: 676 - DNA, 20 bp, synthetic construct
  source 1..20: mol_type = other DNA
  modified_base 19: mod_base = OTHER; note = unlocked nucelic acid - 2', 3', or 5'-methyl or 4'-methoxy steroisomer, 3'-phosphate
  modified_base 20: mod_base = OTHER; note = unlocked nucelic acid - 2', 3', or 5'-methyl or 4'-methoxy steroisomer
  misc_feature 19..20: note = RNA
  misc_feature 1..18: note = DNA
tttttttttttttttttttt

SEQ ID NO: 677 - RNA, 21 nt, synthetic construct
  source 1..21: mol_type = other RNA
  modified_base 1: mod_base = OTHER; note = 2'-O-methyladenosine-3'-phosphorothioate
  modified_base 2: mod_base = OTHER; note = 2'-O-methyladenosine-3'-phosphorothioate
  modified_base 3: mod_base = OTHER; note = 2'-O-methylcytidine-3'-phosphate
  modified_base 4: mod_base = OTHER; note = 2'-O-methyladenosine-3'-phosphate
  modified_base 5: mod_base = OTHER; note = 2'-O-methylguanosine-3'-phosphate
  modified_base 6: mod_base = OTHER; note = 2'-O-methyluridine-3'-phosphate
  modified_base 7: mod_base = OTHER; note = 2'-deoxy-2'-fluoroguanosine-3'-phosphate
  modified_base 8: mod_base = OTHER; note = 2'-O-methyluridine-3'-phosphate
  modified_base 9: mod_base = OTHER; note = 2'-deoxy-2'-fluorouridine-3'-phosphate
  modified_base 10: mod_base = OTHER; note = 2'-deoxy-2'-fluorocytidine-3'-phosphate
  modified_base 11: mod_base = OTHER; note = 2'-deoxy-2'-fluorouridine-3'-phosphate
  modified_base 12: mod_base = OTHER; note = 2'-O-methyluridine-3'-phosphate
  modified_base 13: mod_base = OTHER; note = 2'-O-methylguanosine-3'-phosphate
  modified_base 14: mod_base = OTHER; note = 2'-O-methylcytidine-3'-phosphate
  modified_base 15: mod_base = OTHER; note = 2'-O-methyluridine-3'-phosphate
  modified_base 16: mod_base = OTHER; note = 2'-O-methylcytidine-3'-phosphate
  modified_base 17: mod_base = OTHER; note = 2'-O-methyluridine-3'-phosphate
  modified_base 18: mod_base = OTHER; note = 2'-O-methyladenosine-3'-phosphate
  modified_base 19: mod_base = OTHER; note = 2'-O-methyluridine-3'-phosphate
  modified_base 20: mod_base = OTHER; note = 2'-O-methyladenosine-3'-phosphate
  modified_base 21: mod_base = OTHER; note = 2'-O-methyladenosine-3'-phosphate conjugated at the 3'-end to a tri-N-acetylgalactosamine ligand
aacagtgttcttgctctataa

SEQ ID NO: 678 - RNA, 23 nt, synthetic construct
  source 1..23: mol_type = other RNA
  modified_base 1: mod_base = OTHER; note = 2'-O-methyluridine-3'-phosphorothioate
  modified_base 2: mod_base = OTHER; note = 2'-deoxy-2'-fluorouridine-3'-phosphorothioate
  modified_base 3: mod_base = OTHER; note = 2'-O-methyladenosine-3'-phosphate
  modified_base 4: mod_base = OTHER; note = 2'-O-methyluridine-3'-phosphate
  modified_base 5: mod_base = OTHER; note = 2'-O-methyladenosine-3'-phosphate
  modified_base 6: mod_base = OTHER; note = 2'-deoxy-2'-fluoroguanosine-3'-phosphate
  modified_base 7: mod_base = OTHER; note = 2'-O-methyladenosine-3'-phosphate
  modified_base 8: mod_base = OTHER; note = 2'-O-methylguanosine-3'-phosphate
  modified_base 9: mod_base = OTHER; note = 2'-O-methylcytidine-3'-phosphate
  modified_base 10: mod_base = OTHER; note = 2'-O-methyladenosine-3'-phosphate
  modified_base 11: mod_base = OTHER; note = 2'-O-methyladenosine-3'-phosphate
  modified_base 12: mod_base = OTHER; note = 2'-O-methylguanosine-3'-phosphate
  modified_base 13: mod_base = OTHER; note = 2'-O-methyladenosine-3'-phosphate
  modified_base 14: mod_base = OTHER; note = 2'-deoxy-2'-fluoroadenosine-3'-phosphate
  modified_base 15: mod_base = OTHER; note = 2'-O-methylcytidine-3'-phosphate
  modified_base 16: mod_base = OTHER; note = 2'-deoxy-2'-fluoroadenosine-3'-phosphate
  modified_base 17: mod_base = OTHER; note = 2'-O-methylcytidine-3'-phosphate
  modified_base 18: mod_base = OTHER; note = 2'-O-methyluridine-3'-phosphate
  modified_base 19: mod_base = OTHER; note = 2'-O-methylguanosine-3'-phosphate
  modified_base 20: mod_base = OTHER; note = 2'-O-methyluridine-3'-phosphate
  modified_base 21: mod_base = OTHER; note = 2'-O-methyluridine-3'-phosphorothioate
  modified_base 22: mod_base = OTHER; note = 2'-O-methyluridine-3'-phosphorothioate
  modified_base 23: mod_base = OTHER; note = 2'-O-methyluridine
ttatagagcaagaacactgtttt

SEQ ID NO: 679 - RNA, 21 nt, synthetic construct
  source 1..21: mol_type = other RNA
  modified_base 1: mod_base = OTHER; note = 2'-O-methyladenosine-3'-phosphorothioate
  modified_base 2: mod_base = OTHER; note = 2'-O-methyladenosine-3'-phosphorothioate
  modified_base 3: mod_base = OTHER; note = 2'-O-methylcytidine-3'-phosphate
  modified_base 4: mod_base = OTHER; note = 2'-O-methyladenosine-3'-phosphate
  modified_base 5: mod_base = OTHER; note = 2'-O-methylguanosine-3'-phosphate
  modified_base 6: mod_base = OTHER; note = 2'-O-methyluridine-3'-phosphate
  modified_base 7: mod_base = OTHER; note = 2'-deoxy-2'-fluoroguanosine-3'-phosphate
  modified_base 8: mod_base = OTHER; note = 2'-O-methyluridine-3'-phosphate
  modified_base 9: mod_base = OTHER; note = 2'-deoxy-2'-fluorouridine-3'-phosphate
  modified_base 10: mod_base = OTHER; note = 2'-deoxy-2'-fluorocytidine-3'-phosphate
  modified_base 11: mod_base = OTHER; note = 2'-deoxy-2'-fluorouridine-3'-phosphate
  modified_base 12: mod_base = OTHER; note = 2'-O-methyluridine-3'-phosphate
  modified_base 13: mod_base = OTHER; note = 2'-O-methylguanosine-3'-phosphate
  modified_base 14: mod_base = OTHER; note = 2'-O-methylcytidine-3'-phosphate
  modified_base 15: mod_base = OTHER; note = 2'-O-methyluridine-3'-phosphate
  modified_base 16: mod_base = OTHER; note = 2'-O-methylcytidine-3'-phosphate
  modified_base 17: mod_base = OTHER; note = 2'-O-methyluridine-3'-phosphate
  modified_base 18: mod_base = OTHER; note = 2'-O-methyladenosine-3'-phosphate
  modified_base 19: mod_base = OTHER; note = 2'-O-methyluridine-3'-phosphate
  modified_base 20: mod_base = OTHER; note = 2'-O-methyladenosine-3'-phosphate
  modified_base 21: mod_base = OTHER; note = 2'-O-methyladenosine-3'-phosphate conjugated at the 3'-end to a tri-N-acetylgalactosamine ligand
aacagtgttcttgctctataa

SEQ ID NO: 680 - RNA, 23 nt, synthetic construct
  source 1..23: mol_type = other RNA
  modified_base 1: mod_base = OTHER; note = 2'-O-methyluridine-3'-phosphorothioate
  modified_base 2: mod_base = OTHER; note = 2'-deoxy-2'-fluorouridine-3'-phosphorothioate
  modified_base 3: mod_base = OTHER; note = 2'-O-methyladenosine-3'-phosphate
  modified_base 4: mod_base = OTHER; note (2S,4R)-N-acetyl-2-hydroxymethyl-4-hydroxypyrrolidine 4-phosphate
  modified_base 5: mod_base = OTHER; note = 2'-O-methyladenosine-3'-phosphate
  modified_base 6: mod_base = OTHER; note = 2'-deoxy-2'-fluoroguanosine-3'-phosphate
  modified_base 7: mod_base = OTHER; note = 2'-O-methyladenosine-3'-phosphate
  modified_base 8: mod_base = OTHER; note = 2'-O-methylguanosine-3'-phosphate
  modified_base 9: mod_base = OTHER; note = 2'-O-methylcytidine-3'-phosphate
  modified_base 10: mod_base = OTHER; note = 2'-O-methyladenosine-3'-phosphate
  modified_base 11: mod_base = OTHER; note = 2'-O-methyladenosine-3'-phosphate
  modified_base 12: mod_base = OTHER; note = 2'-O-methylguanosine-3'-phosphate
  modified_base 13: mod_base = OTHER; note = 2'-O-methyladenosine-3'-phosphate
  modified_base 14: mod_base = OTHER; note = 2'-deoxy-2'-fluoroadenosine-3'-phosphate
  modified_base 15: mod_base = OTHER; note = 2'-O-methylcytidine-3'-phosphate
  modified_base 16: mod_base = OTHER; note = 2'-deoxy-2'-fluoroadenosine-3'-phosphate
  modified_base 17: mod_base = OTHER; note = 2'-O-methylcytidine-3'-phosphate
  modified_base 18: mod_base = OTHER; note = 2'-O-methyluridine-3'-phosphate
  modified_base 19: mod_base = OTHER; note = 2'-O-methylguanosine-3'-phosphate
  modified_base 20: mod_base = OTHER; note = 2'-O-methyluridine-3'-phosphate
  modified_base 21: mod_base = OTHER; note = 2'-O-methyluridine-3'-phosphorothioate
  modified_base 22: mod_base = OTHER; note = 2'-O-methyluridine-3'-phosphorothioate
  modified_base 23: mod_base = OTHER; note = 2'-O-methyluridine
ttanagagcaagaacactgtttt

SEQ ID NO: 681 - RNA, 21 nt, synthetic construct
  source 1..21: mol_type = other RNA
  modified_base 1: mod_base = OTHER; note = 2'-O-methyladenosine-3'-phosphorothioate
  modified_base 2: mod_base = OTHER; note = 2'-O-methyladenosine-3'-phosphorothioate
  modified_base 3: mod_base = OTHER; note = 2'-O-methylcytidine-3'-phosphate
  modified_base 4: mod_base = OTHER; note = 2'-O-methyladenosine-3'-phosphate
  modified_base 5: mod_base = OTHER; note = 2'-O-methylguanosine-3'-phosphate
  modified_base 6: mod_base = OTHER; note = 2'-O-methyluridine-3'-phosphate
  modified_base 7: mod_base = OTHER; note = 2'-deoxy-2'-fluoroguanosine-3'-phosphate
  modified_base 8: mod_base = OTHER; note = 2'-O-methyluridine-3'-phosphate
  modified_base 9: mod_base = OTHER; note = 2'-deoxy-2'-fluorouridine-3'-phosphate
  modified_base 10: mod_base = OTHER; note = 2'-deoxy-2'-fluorocytidine-3'-phosphate
  modified_base 11: mod_base = OTHER; note = 2'-deoxy-2'-fluorouridine-3'-phosphate
  modified_base 12: mod_base = OTHER; note = 2'-O-methyluridine-3'-phosphate
  modified_base 13: mod_base = OTHER; note = 2'-O-methylguanosine-3'-phosphate
  modified_base 14: mod_base = OTHER; note = 2'-O-methylcytidine-3'-phosphate
  modified_base 15: mod_base = OTHER; note = 2'-O-methyluridine-3'-phosphate
  modified_base 16: mod_base = OTHER; note = 2'-O-methylcytidine-3'-phosphate
  modified_base 17: mod_base = OTHER; note = 2'-O-methyluridine-3'-phosphate
  modified_base 18: mod_base = OTHER; note = 2'-O-methyladenosine-3'-phosphate
  modified_base 19: mod_base = OTHER; note = 2'-O-methyluridine-3'-phosphate
  modified_base 20: mod_base = OTHER; note = 2'-O-methyladenosine-3'-phosphate
  modified_base 21: mod_base = OTHER; note = 2'-O-methyladenosine-3'-phosphate conjugated at the 3'-end to a tri-N-acetylgalactosamine ligand
aacagtgttcttgctctataa

SEQ ID NO: 682 - RNA, 23 nt, synthetic construct
  source 1..23: mol_type = other RNA
  modified_base 1: mod_base = OTHER; note = 2'-O-methyluridine-3'-phosphorothioate
  modified_base 2: mod_base = OTHER; note = 2'-deoxy-2'-fluorouridine-3'-phosphorothioate
  modified_base 3: mod_base = OTHER; note = 2'-O-methyladenosine-3'-phosphate
  modified_base 4: mod_base = OTHER; note (2S,4R)-N-(2-(thymin-1-yl)-1-oxoethyl)-2-hydroxymethyl-4-hy droxypyrrolidine 4-phosphate
  modified_base 5: mod_base = OTHER; note = 2'-O-methyladenosine-3'-phosphate
  modified_base 6: mod_base = OTHER; note = 2'-deoxy-2'-fluoroguanosine-3'-phosphate
  modified_base 7: mod_base = OTHER; note = 2'-O-methyladenosine-3'-phosphate
  modified_base 8: mod_base = OTHER; note = 2'-O-methylguanosine-3'-phosphate
  modified_base 9: mod_base = OTHER; note = 2'-O-methylcytidine-3'-phosphate
  modified_base 10: mod_base = OTHER; note = 2'-O-methyladenosine-3'-phosphate
  modified_base 11: mod_base = OTHER; note = 2'-O-methyladenosine-3'-phosphate
  modified_base 12: mod_base = OTHER; note = 2'-O-methylguanosine-3'-phosphate
  modified_base 13: mod_base = OTHER; note = 2'-O-methyladenosine-3'-phosphate
  modified_base 14: mod_base = OTHER; note = 2'-deoxy-2'-fluoroadenosine-3'-phosphate
  modified_base 15: mod_base = OTHER; note = 2'-O-methylcytidine-3'-phosphate
  modified_base 16: mod_base = OTHER; note = 2'-deoxy-2'-fluoroadenosine-3'-phosphate
  modified_base 17: mod_base = OTHER; note = 2'-O-methylcytidine-3'-phosphate
  modified_base 18: mod_base = OTHER; note = 2'-O-methyluridine-3'-phosphate
  modified_base 19: mod_base = OTHER; note = 2'-O-methylguanosine-3'-phosphate
  modified_base 20: mod_base = OTHER; note = 2'-O-methyluridine-3'-phosphate
  modified_base 21: mod_base = OTHER; note = 2'-O-methyluridine-3'-phosphorothioate
  modified_base 22: mod_base = OTHER; note = 2'-O-methyluridine-3'-phosphorothioate
  modified_base 23: mod_base = OTHER; note = 2'-O-methyluridine
ttatagagcaagaacactgtttt

SEQ ID NO: 683 - RNA, 21 nt, synthetic construct
  source 1..21: mol_type = other RNA
  modified_base 1: mod_base = OTHER; note = 2'-O-methyladenosine-3'-phosphorothioate
  modified_base 2: mod_base = OTHER; note = 2'-O-methyladenosine-3'-phosphorothioate
  modified_base 3: mod_base = OTHER; note = 2'-O-methylcytidine-3'-phosphate
  modified_base 4: mod_base = OTHER; note = 2'-O-methyladenosine-3'-phosphate
  modified_base 5: mod_base = OTHER; note = 2'-O-methylguanosine-3'-phosphate
  modified_base 6: mod_base = OTHER; note = 2'-O-methyluridine-3'-phosphate
  modified_base 7: mod_base = OTHER; note = 2'-deoxy-2'-fluoroguanosine-3'-phosphate
  modified_base 8: mod_base = OTHER; note = 2'-O-methyluridine-3'-phosphate
  modified_base 9: mod_base = OTHER; note = 2'-deoxy-2'-fluorouridine-3'-phosphate
  modified_base 10: mod_base = OTHER; note = 2'-deoxy-2'-fluorocytidine-3'-phosphate
  modified_base 11: mod_base = OTHER; note = 2'-deoxy-2'-fluorouridine-3'-phosphate
  modified_base 12: mod_base = OTHER; note = 2'-O-methyluridine-3'-phosphate
  modified_base 13: mod_base = OTHER; note = 2'-O-methylguanosine-3'-phosphate
  modified_base 14: mod_base = OTHER; note = 2'-O-methylcytidine-3'-phosphate
  modified_base 15: mod_base = OTHER; note = 2'-O-methyluridine-3'-phosphate
  modified_base 16: mod_base = OTHER; note = 2'-O-methylcytidine-3'-phosphate
  modified_base 17: mod_base = OTHER; note = 2'-O-methyluridine-3'-phosphate
  modified_base 18: mod_base = OTHER; note = 2'-O-methyladenosine-3'-phosphate
  modified_base 19: mod_base = OTHER; note = 2'-O-methyluridine-3'-phosphate
  modified_base 20: mod_base = OTHER; note = 2'-O-methyladenosine-3'-phosphate
  modified_base 21: mod_base = OTHER; note = 2'-O-methyladenosine-3'-phosphate conjugated at the 3'-end to a tri-N-acetylgalactosamine ligand
aacagtgttcttgctctataa

SEQ ID NO: 684 - RNA, 23 nt, synthetic construct
  source 1..23: mol_type = other RNA
  modified_base 1: mod_base = OTHER; note = 2'-O-methyluridine-3'-phosphorothioate
  modified_base 2: mod_base = OTHER; note = 2'-deoxy-2'-fluorouridine-3'-phosphorothioate
  modified_base 3: mod_base = OTHER; note = 2'-O-methyladenosine-3'-phosphate
  modified_base 4: mod_base = OTHER; note = 2'-O-methyluridine-3'-phosphate
  modified_base 5: mod_base = OTHER; note (2S,4R)-N-acetyl-2-hydroxymethyl-4-hydroxypyrrolidine 4-phosphate
  modified_base 6: mod_base = OTHER; note = 2'-deoxy-2'-fluoroguanosine-3'-phosphate
  modified_base 7: mod_base = OTHER; note = 2'-O-methyladenosine-3'-phosphate
  modified_base 8: mod_base = OTHER; note = 2'-O-methylguanosine-3'-phosphate
  modified_base 9: mod_base = OTHER; note = 2'-O-methylcytidine-3'-phosphate
  modified_base 10: mod_base = OTHER; note = 2'-O-methyladenosine-3'-phosphate
  modified_base 11: mod_base = OTHER; note = 2'-O-methyladenosine-3'-phosphate
  modified_base 12: mod_base = OTHER; note = 2'-O-methylguanosine-3'-phosphate
  modified_base 13: mod_base = OTHER; note = 2'-O-methyladenosine-3'-phosphate
  modified_base 14: mod_base = OTHER; note = 2'-deoxy-2'-fluoroadenosine-3'-phosphate
  modified_base 15: mod_base = OTHER; note = 2'-O-methylcytidine-3'-phosphate
  modified_base 16: mod_base = OTHER; note = 2'-deoxy-2'-fluoroadenosine-3'-phosphate
  modified_base 17: mod_base = OTHER; note = 2'-O-methylcytidine-3'-phosphate
  modified_base 18: mod_base = OTHER; note = 2'-O-methyluridine-3'-phosphate
  modified_base 19: mod_base = OTHER; note = 2'-O-methylguanosine-3'-phosphate
  modified_base 20: mod_base = OTHER; note = 2'-O-methyluridine-3'-phosphate
  modified_base 21: mod_base = OTHER; note = 2'-O-methyluridine-3'-phosphorothioate
  modified_base 22: mod_base = OTHER; note = 2'-O-methyluridine-3'-phosphorothioate
  modified_base 23: mod_base = OTHER; note = 2'-O-methyluridine
ttatngagcaagaacactgtttt

SEQ ID NO: 685 - RNA, 21 nt, synthetic construct
  source 1..21: mol_type = other RNA
  modified_base 1: mod_base = OTHER; note = 2'-O-methyladenosine-3'-phosphorothioate
  modified_base 2: mod_base = OTHER; note = 2'-O-methyladenosine-3'-phosphorothioate
  modified_base 3: mod_base = OTHER; note = 2'-O-methylcytidine-3'-phosphate
  modified_base 4: mod_base = OTHER; note = 2'-O-methyladenosine-3'-phosphate
  modified_base 5: mod_base = OTHER; note = 2'-O-methylguanosine-3'-phosphate
  modified_base 6: mod_base = OTHER; note = 2'-O-methyluridine-3'-phosphate
  modified_base 7: mod_base = OTHER; note = 2'-deoxy-2'-fluoroguanosine-3'-phosphate
  modified_base 8: mod_base = OTHER; note = 2'-O-methyluridine-3'-phosphate
  modified_base 9: mod_base = OTHER; note = 2'-deoxy-2'-fluorouridine-3'-phosphate
  modified_base 10: mod_base = OTHER; note = 2'-deoxy-2'-fluorocytidine-3'-phosphate
  modified_base 11: mod_base = OTHER; note = 2'-deoxy-2'-fluorouridine-3'-phosphate
  modified_base 12: mod_base = OTHER; note = 2'-O-methyluridine-3'-phosphate
  modified_base 13: mod_base = OTHER; note = 2'-O-methylguanosine-3'-phosphate
  modified_base 14: mod_base = OTHER; note = 2'-O-methylcytidine-3'-phosphate
  modified_base 15: mod_base = OTHER; note = 2'-O-methyluridine-3'-phosphate
  modified_base 16: mod_base = OTHER; note = 2'-O-methylcytidine-3'-phosphate
  modified_base 17: mod_base = OTHER; note = 2'-O-methyluridine-3'-phosphate
  modified_base 18: mod_base = OTHER; note = 2'-O-methyladenosine-3'-phosphate
  modified_base 19: mod_base = OTHER; note = 2'-O-methyluridine-3'-phosphate
  modified_base 20: mod_base = OTHER; note = 2'-O-methyladenosine-3'-phosphate
  modified_base 21: mod_base = OTHER; note = 2'-O-methyladenosine-3'-phosphate conjugated at the 3'-end to a tri-N-acetylgalactosamine ligand
aacagtgttcttgctctataa

SEQ ID NO: 686 - RNA, 23 nt, synthetic construct
  source 1..23: mol_type = other RNA
  modified_base 1: mod_base = OTHER; note = 2'-O-methyluridine-3'-phosphorothioate
  modified_base 2: mod_base = OTHER; note = 2'-deoxy-2'-fluorouridine-3'-phosphorothioate
  modified_base 3: mod_base = OTHER; note = 2'-O-methyladenosine-3'-phosphate
  modified_base 4: mod_base = OTHER; note = 2'-O-methyluridine-3'-phosphate
  modified_base 5: mod_base = OTHER; note (2S,4R)-N-(2-(adenin-9-yl)-1-oxoethyl)-2-hydroxymethyl-4-hy droxypyrrolidine 4-phosphate
  modified_base 6: mod_base = OTHER; note = 2'-deoxy-2'-fluoroguanosine-3'-phosphate
  modified_base 7: mod_base = OTHER; note = 2'-O-methyladenosine-3'-phosphate
  modified_base 8: mod_base = OTHER; note = 2'-O-methylguanosine-3'-phosphate
  modified_base 9: mod_base = OTHER; note = 2'-O-methylcytidine-3'-phosphate
  modified_base 10: mod_base = OTHER; note = 2'-O-methyladenosine-3'-phosphate
  modified_base 11: mod_base = OTHER; note = 2'-O-methyladenosine-3'-phosphate
  modified_base 12: mod_base = OTHER; note = 2'-O-methylguanosine-3'-phosphate
  modified_base 13: mod_base = OTHER; note = 2'-O-methyladenosine-3'-phosphate
  modified_base 14: mod_base = OTHER; note = 2'-deoxy-2'-fluoroadenosine-3'-phosphate
  modified_base 15: mod_base = OTHER; note = 2'-O-methylcytidine-3'-phosphate
  modified_base 16: mod_base = OTHER; note = 2'-deoxy-2'-fluoroadenosine-3'-phosphate
  modified_base 17: mod_base = OTHER; note = 2'-O-methylcytidine-3'-phosphate
  modified_base 18: mod_base = OTHER; note = 2'-O-methyluridine-3'-phosphate
  modified_base 19: mod_base = OTHER; note = 2'-O-methylguanosine-3'-phosphate
  modified_base 20: mod_base = OTHER; note = 2'-O-methyluridine-3'-phosphate
  modified_base 21: mod_base = OTHER; note = 2'-O-methyluridine-3'-phosphorothioate
  modified_base 22: mod_base = OTHER; note = 2'-O-methyluridine-3'-phosphorothioate
  modified_base 23: mod_base = OTHER; note = 2'-O-methyluridine
ttatagagcaagaacactgtttt

SEQ ID NO: 687 - RNA, 21 nt, synthetic construct
  source 1..21: mol_type = other RNA
  modified_base 1: mod_base = OTHER; note = 2'-O-methyladenosine-3'-phosphorothioate
  modified_base 2: mod_base = OTHER; note = 2'-O-methyladenosine-3'-phosphorothioate
  modified_base 3: mod_base = OTHER; note = 2'-O-methylcytidine-3'-phosphate
  modified_base 4: mod_base = OTHER; note = 2'-O-methyladenosine-3'-phosphate
  modified_base 5: mod_base = OTHER; note = 2'-O-methylguanosine-3'-phosphate
  modified_base 6: mod_base = OTHER; note = 2'-O-methyluridine-3'-phosphate
  modified_base 7: mod_base = OTHER; note = 2'-deoxy-2'-fluoroguanosine-3'-phosphate
  modified_base 8: mod_base = OTHER; note = 2'-O-methyluridine-3'-phosphate
  modified_base 9: mod_base = OTHER; note = 2'-deoxy-2'-fluorouridine-3'-phosphate
  modified_base 10: mod_base = OTHER; note = 2'-deoxy-2'-fluorocytidine-3'-phosphate
  modified_base 11: mod_base = OTHER; note = 2'-deoxy-2'-fluorouridine-3'-phosphate
  modified_base 12: mod_base = OTHER; note = 2'-O-methyluridine-3'-phosphate
  modified_base 13: mod_base = OTHER; note = 2'-O-methylguanosine-3'-phosphate
  modified_base 14: mod_base = OTHER; note = 2'-O-methylcytidine-3'-phosphate
  modified_base 15: mod_base = OTHER; note = 2'-O-methyluridine-3'-phosphate
  modified_base 16: mod_base = OTHER; note = 2'-O-methylcytidine-3'-phosphate
  modified_base 17: mod_base = OTHER; note = 2'-O-methyluridine-3'-phosphate
  modified_base 18: mod_base = OTHER; note = 2'-O-methyladenosine-3'-phosphate
  modified_base 19: mod_base = OTHER; note = 2'-O-methyluridine-3'-phosphate
  modified_base 20: mod_base = OTHER; note = 2'-O-methyladenosine-3'-phosphate
  modified_base 21: mod_base = OTHER; note = 2'-O-methyladenosine-3'-phosphate conjugated at the 3'-end to a tri-N-acetylgalactosamine ligand
aacagtgttcttgctctataa

SEQ ID NO: 688 - RNA, 23 nt, synthetic construct
  source 1..23: mol_type = other RNA
  modified_base 1: mod_base = OTHER; note = 2'-O-methyluridine-3'-phosphorothioate
  modified_base 2: mod_base = OTHER; note = 2'-deoxy-2'-fluorouridine-3'-phosphorothioate
  modified_base 3: mod_base = OTHER; note = 2'-O-methyladenosine-3'-phosphate
  modified_base 4: mod_base = OTHER; note = 2'-O-methyluridine-3'-phosphate
  modified_base 5: mod_base = OTHER; note = 2'-O-methyladenosine-3'-phosphate
  modified_base 6: mod_base = OTHER; note = 2'-deoxy-2'-fluoroguanosine-3'-phosphate
  modified_base 7: mod_base = OTHER; note = 2'-O-methyladenosine-3'-phosphate
  modified_base 8: mod_base = OTHER; note = 2'-O-methylguanosine-3'-phosphate
  modified_base 9: mod_base = OTHER; note = 2'-O-methylcytidine-3'-phosphate
  modified_base 10: mod_base = OTHER; note = 2'-O-methyladenosine-3'-phosphate
  modified_base 11: mod_base = OTHER; note = 2'-O-methyladenosine-3'-phosphate
  modified_base 12: mod_base = OTHER; note = 2'-O-methylguanosine-3'-phosphate
  modified_base 13: mod_base = OTHER; note = 2'-O-methyladenosine-3'-phosphate
  modified_base 14: mod_base = OTHER; note = 2'-deoxy-2'-fluoroadenosine-3'-phosphate
  modified_base 15: mod_base = OTHER; note = 2'-O-methylcytidine-3'-phosphate
  modified_base 16: mod_base = OTHER; note = 2'-deoxy-2'-fluoroadenosine-3'-phosphate
  modified_base 17: mod_base = OTHER; note = 2'-O-methylcytidine-3'-phosphate
  modified_base 18: mod_base = OTHER; note = 2'-O-methyluridine-3'-phosphate
  modified_base 19: mod_base = OTHER; note = 2'-O-methylguanosine-3'-phosphate
  modified_base 20: mod_base = OTHER; note = 2'-O-methyluridine-3'-phosphate
  modified_base 21: mod_base = OTHER; note = 2'-O-methyluridine-3'-phosphorothioate
  modified_base 22: mod_base = OTHER; note = 2'-O-methyluridine-3'-phosphorothioate
  modified_base 23: mod_base = OTHER; note = 2'-O-methyluridine
ttatagagcaagaacactgtttt

SEQ ID NO: 689 - RNA, 21 nt, synthetic construct
  source 1..21: mol_type = other RNA
  modified_base 1: mod_base = OTHER; note = 2'-O-methyladenosine-3'-phosphorothioate
  modified_base 2: mod_base = OTHER; note = 2'-O-methyladenosine-3'-phosphorothioate
  modified_base 3: mod_base = OTHER; note = 2'-O-methylcytidine-3'-phosphate
  modified_base 4: mod_base = OTHER; note = 2'-O-methyladenosine-3'-phosphate
  modified_base 5: mod_base = OTHER; note = 2'-O-methylguanosine-3'-phosphate
  modified_base 6: mod_base = OTHER; note = 2'-O-methyluridine-3'-phosphate
  modified_base 7: mod_base = OTHER; note = 2'-deoxy-2'-fluoroguanosine-3'-phosphate
  modified_base 8: mod_base = OTHER; note = 2'-O-methyluridine-3'-phosphate
  modified_base 9: mod_base = OTHER; note = 2'-deoxy-2'-fluorouridine-3'-phosphate
  modified_base 10: mod_base = OTHER; note = 2'-deoxy-2'-fluorocytidine-3'-phosphate
  modified_base 11: mod_base = OTHER; note = 2'-deoxy-2'-fluorouridine-3'-phosphate
  modified_base 12: mod_base = OTHER; note = 2'-O-methyluridine-3'-phosphate
  modified_base 13: mod_base = OTHER; note = 2'-O-methylguanosine-3'-phosphate
  modified_base 14: mod_base = OTHER; note = 2'-O-methylcytidine-3'-phosphate
  modified_base 15: mod_base = OTHER; note = 2'-O-methyluridine-3'-phosphate
  modified_base 16: mod_base = OTHER; note = 2'-O-methylcytidine-3'-phosphate
  modified_base 17: mod_base = OTHER; note = 2'-O-methyluridine-3'-phosphate
  modified_base 18: mod_base = OTHER; note = 2'-O-methyladenosine-3'-phosphate
  modified_base 19: mod_base = OTHER; note = 2'-O-methyluridine-3'-phosphate
  modified_base 20: mod_base = OTHER; note = 2'-O-methyladenosine-3'-phosphate
  modified_base 21: mod_base = OTHER; note = 2'-O-methyladenosine-3'-phosphate conjugated at the 3'-end to a tri-N-acetylgalactosamine ligand
aacagtgttcttgctctataa

SEQ ID NO: 690 - RNA, 23 nt, synthetic construct
  source 1..23: mol_type = other RNA
  modified_base 1: mod_base = OTHER; note = 2'-O-methyluridine-3'-phosphorothioate
  modified_base 2: mod_base = OTHER; note = 2'-deoxy-2'-fluorouridine-3'-phosphorothioate
  modified_base 3: mod_base = OTHER; note = 2'-O-methyladenosine-3'-phosphate
  modified_base 4: mod_base = OTHER; note = 2'-O-methyluridine-3'-phosphate
  modified_base 5: mod_base = OTHER; note = 2'-O-methyladenosine-3'-phosphate
  modified_base 6: mod_base = OTHER; note = 2'-deoxy-2'-fluoroguanosine-3'-phosphate
  modified_base 7: mod_base = OTHER; note = 2'-O-methyladenosine-3'-phosphate
  modified_base 8: mod_base = OTHER; note (2S,4R)-N-acetyl-2-hydroxymethyl-4-hydroxypyrrolidine 4-phosphate
  modified_base 9: mod_base = OTHER; note = 2'-O-methylcytidine-3'-phosphate
  modified_base 10: mod_base = OTHER; note = 2'-O-methyladenosine-3'-phosphate
  modified_base 11: mod_base = OTHER; note = 2'-O-methyladenosine-3'-phosphate
  modified_base 12: mod_base = OTHER; note = 2'-O-methylguanosine-3'-phosphate
  modified_base 13: mod_base = OTHER; note = 2'-O-methyladenosine-3'-phosphate
  modified_base 14: mod_base = OTHER; note = 2'-deoxy-2'-fluoroadenosine-3'-phosphate
  modified_base 15: mod_base = OTHER; note = 2'-O-methylcytidine-3'-phosphate
  modified_base 16: mod_base = OTHER; note = 2'-deoxy-2'-fluoroadenosine-3'-phosphate
  modified_base 17: mod_base = OTHER; note = 2'-O-methylcytidine-3'-phosphate
  modified_base 18: mod_base = OTHER; note = 2'-O-methyluridine-3'-phosphate
  modified_base 19: mod_base = OTHER; note = 2'-O-methylguanosine-3'-phosphate
  modified_base 20: mod_base = OTHER; note = 2'-O-methyluridine-3'-phosphate
  modified_base 21: mod_base = OTHER; note = 2'-O-methyluridine-3'-phosphorothioate
  modified_base 22: mod_base = OTHER; note = 2'-O-methyluridine-3'-phosphorothioate
  modified_base 23: mod_base = OTHER; note = 2'-O-methyluridine
ttatagancaagaacactgtttt

SEQ ID NO: 691 - RNA, 21 nt, synthetic construct
  source 1..21: mol_type = other RNA
  modified_base 1: mod_base = OTHER; note = 2'-O-methyladenosine-3'-phosphorothioate
  modified_base 2: mod_base = OTHER; note = 2'-O-methyladenosine-3'-phosphorothioate
  modified_base 3: mod_base = OTHER; note = 2'-O-methylcytidine-3'-phosphate
  modified_base 4: mod_base = OTHER; note = 2'-O-methyladenosine-3'-phosphate
  modified_base 5: mod_base = OTHER; note = 2'-O-methylguanosine-3'-phosphate
  modified_base 6: mod_base = OTHER; note = 2'-O-methyluridine-3'-phosphate
  modified_base 7: mod_base = OTHER; note = 2'-deoxy-2'-fluoroguanosine-3'-phosphate
  modified_base 8: mod_base = OTHER; note = 2'-O-methyluridine-3'-phosphate
  modified_base 9: mod_base = OTHER; note = 2'-deoxy-2'-fluorouridine-3'-phosphate
  modified_base 10: mod_base = OTHER; note = 2'-deoxy-2'-fluorocytidine-3'-phosphate
  modified_base 11: mod_base = OTHER; note = 2'-deoxy-2'-fluorouridine-3'-phosphate
  modified_base 12: mod_base = OTHER; note = 2'-O-methyluridine-3'-phosphate
  modified_base 13: mod_base = OTHER; note = 2'-O-methylguanosine-3'-phosphate
  modified_base 14: mod_base = OTHER; note = 2'-O-methylcytidine-3'-phosphate
  modified_base 15: mod_base = OTHER; note = 2'-O-methyluridine-3'-phosphate
  modified_base 16: mod_base = OTHER; note = 2'-O-methylcytidine-3'-phosphate
  modified_base 17: mod_base = OTHER; note = 2'-O-methyluridine-3'-phosphate
  modified_base 18: mod_base = OTHER; note = 2'-O-methyladenosine-3'-phosphate
  modified_base 19: mod_base = OTHER; note = 2'-O-methyluridine-3'-phosphate
  modified_base 20: mod_base = OTHER; note = 2'-O-methyladenosine-3'-phosphate
  modified_base 21: mod_base = OTHER; note = 2'-O-methyladenosine-3'-phosphate conjugated at the 3'-end to a tri-N-acetylgalactosamine ligand
aacagtgttcttgctctataa

SEQ ID NO: 692 - RNA, 23 nt, synthetic construct
  source 1..23: mol_type = other RNA
  modified_base 1: mod_base = OTHER; note = 2'-O-methyluridine-3'-phosphorothioate
  modified_base 2: mod_base = OTHER; note = 2'-deoxy-2'-fluorouridine-3'-phosphorothioate
  modified_base 3: mod_base = OTHER; note = 2'-O-methyladenosine-3'-phosphate
  modified_base 4: mod_base = OTHER; note = 2'-O-methyluridine-3'-phosphate
  modified_base 5: mod_base = OTHER; note = 2'-O-methyladenosine-3'-phosphate
  modified_base 6: mod_base = OTHER; note = 2'-deoxy-2'-fluoroguanosine-3'-phosphate
  modified_base 7: mod_base = OTHER; note = 2'-O-methyladenosine-3'-phosphate
  modified_base 8: mod_base = OTHER; note (2S,4R)-N-(2-(guanin-9-yl)-1-oxoethyl)-2-hydroxymethyl-4-hy droxypyrrolidine 4-phosphate
  modified_base 9: mod_base = OTHER; note = 2'-O-methylcytidine-3'-phosphate
  modified_base 10: mod_base = OTHER; note = 2'-O-methyladenosine-3'-phosphate
  modified_base 11: mod_base = OTHER; note = 2'-O-methyladenosine-3'-phosphate
  modified_base 12: mod_base = OTHER; note = 2'-O-methylguanosine-3'-phosphate
  modified_base 13: mod_base = OTHER; note = 2'-O-methyladenosine-3'-phosphate
  modified_base 14: mod_base = OTHER; note = 2'-deoxy-2'-fluoroadenosine-3'-phosphate
  modified_base 15: mod_base = OTHER; note = 2'-O-methylcytidine-3'-phosphate
  modified_base 16: mod_base = OTHER; note = 2'-deoxy-2'-fluoroadenosine-3'-phosphate
  modified_base 17: mod_base = OTHER; note = 2'-O-methylcytidine-3'-phosphate
  modified_base 18: mod_base = OTHER; note = 2'-O-methyluridine-3'-phosphate
  modified_base 19: mod_base = OTHER; note = 2'-O-methylguanosine-3'-phosphate
  modified_base 20: mod_base = OTHER; note = 2'-O-methyluridine-3'-phosphate
  modified_base 21: mod_base = OTHER; note = 2'-O-methyluridine-3'-phosphorothioate
  modified_base 22: mod_base = OTHER; note = 2'-O-methyluridine-3'-phosphorothioate
  modified_base 23: mod_base = OTHER; note = 2'-O-methyluridine
ttatagagcaagaacactgtttt

SEQ ID NO: 693 - RNA, 21 nt, synthetic construct
  source 1..21: mol_type = other RNA
  modified_base 1: mod_base = OTHER; note = 2'-O-methyladenosine-3'-phosphorothioate
  modified_base 2: mod_base = OTHER; note = 2'-O-methyladenosine-3'-phosphorothioate
  modified_base 3: mod_base = OTHER; note = 2'-O-methylcytidine-3'-phosphate
  modified_base 4: mod_base = OTHER; note = 2'-O-methyladenosine-3'-phosphate
  modified_base 5: mod_base = OTHER; note = 2'-O-methylguanosine-3'-phosphate
  modified_base 6: mod_base = OTHER; note = 2'-O-methyluridine-3'-phosphate
  modified_base 7: mod_base = OTHER; note = 2'-deoxy-2'-fluoroguanosine-3'-phosphate
  modified_base 8: mod_base = OTHER; note = 2'-O-methyluridine-3'-phosphate
  modified_base 9: mod_base = OTHER; note = 2'-deoxy-2'-fluorouridine-3'-phosphate
  modified_base 10: mod_base = OTHER; note = 2'-deoxy-2'-fluorocytidine-3'-phosphate
  modified_base 11: mod_base = OTHER; note = 2'-deoxy-2'-fluorouridine-3'-phosphate
  modified_base 12: mod_base = OTHER; note = 2'-O-methyluridine-3'-phosphate
  modified_base 13: mod_base = OTHER; note = 2'-O-methylguanosine-3'-phosphate
  modified_base 14: mod_base = OTHER; note = 2'-O-methylcytidine-3'-phosphate
  modified_base 15: mod_base = OTHER; note = 2'-O-methyluridine-3'-phosphate
  modified_base 16: mod_base = OTHER; note = 2'-O-methylcytidine-3'-phosphate
  modified_base 17: mod_base = OTHER; note = 2'-O-methyluridine-3'-phosphate
  modified_base 18: mod_base = OTHER; note = 2'-O-methyladenosine-3'-phosphate
  modified_base 19: mod_base = OTHER; note = 2'-O-methyluridine-3'-phosphate
  modified_base 20: mod_base = OTHER; note = 2'-O-methyladenosine-3'-phosphate
  modified_base 21: mod_base = OTHER; note = 2'-O-methyladenosine-3'-phosphate conjugated at the 3'-end to a tri-N-acetylgalactosamine ligand
aacagtgttcttgctctataa

SEQ ID NO: 694 - RNA, 23 nt, synthetic construct
  source 1..23: mol_type = other RNA
  modified_base 1: mod_base = OTHER; note = 2'-O-methyluridine-3'-phosphorothioate
  modified_base 2: mod_base = OTHER; note = 2'-deoxy-2'-fluorouridine-3'-phosphorothioate
  modified_base 3: mod_base = OTHER; note = 2'-O-methyladenosine-3'-phosphate
  modified_base 4: mod_base = OTHER; note = 2'-O-methyluridine-3'-phosphate
  modified_base 5: mod_base = OTHER; note = 2'-O-methyladenosine-3'-phosphate
  modified_base 6: mod_base = OTHER; note = 2'-deoxy-2'-fluoroguanosine-3'-phosphate
  modified_base 7: mod_base = OTHER; note = 2'-O-methyladenosine-3'-phosphate
  modified_base 8: mod_base = OTHER; note = 2'-O-methylguanosine-3'-phosphate
  modified_base 9: mod_base = OTHER; note = 2'-O-methylcytidine-3'-phosphate
  modified_base 10: mod_base = OTHER; note = 2'-O-methyladenosine-3'-phosphate
  modified_base 11: mod_base = OTHER; note = 2'-O-methyladenosine-3'-phosphate
  modified_base 12: mod_base = OTHER; note = 2'-O-methylguanosine-3'-phosphate
  modified_base 13: mod_base = OTHER; note = 2'-O-methyladenosine-3'-phosphate
  modified_base 14: mod_base = OTHER; note = 2'-deoxy-2'-fluoroadenosine-3'-phosphate
  modified_base 15: mod_base = OTHER; note = 2'-O-methylcytidine-3'-phosphate
  modified_base 16: mod_base = OTHER; note = 2'-deoxy-2'-fluoroadenosine-3'-phosphate
  modified_base 17: mod_base = OTHER; note = 2'-O-methylcytidine-3'-phosphate
  modified_base 18: mod_base = OTHER; note = 2'-O-methyluridine-3'-phosphate
  modified_base 19: mod_base = OTHER; note = 2'-O-methylguanosine-3'-phosphate
  modified_base 20: mod_base = OTHER; note = 2'-O-methyluridine-3'-phosphate
  modified_base 21: mod_base = OTHER; note = 2'-O-methyluridine-3'-phosphorothioate
  modified_base 22: mod_base = OTHER; note = 2'-O-methyluridine-3'-phosphorothioate
  modified_base 23: mod_base = OTHER; note = 2'-O-methyluridine
ttatagagcaagaacactgtttt

SEQ ID NO: 695 - RNA, 21 nt, synthetic construct
  source 1..21: mol_type = other RNA
  modified_base 1: mod_base = OTHER; note = 2'-O-methyladenosine-3'-phosphorothioate
  modified_base 2: mod_base = OTHER; note = 2'-O-methyladenosine-3'-phosphorothioate
  modified_base 3: mod_base = OTHER; note = 2'-O-methylcytidine-3'-phosphate
  modified_base 4: mod_base = OTHER; note = 2'-O-methyladenosine-3'-phosphate
  modified_base 5: mod_base = OTHER; note = 2'-O-methylguanosine-3'-phosphate
  modified_base 6: mod_base = OTHER; note = 2'-O-methyluridine-3'-phosphate
  modified_base 7: mod_base = OTHER; note = 2'-deoxy-2'-fluoroguanosine-3'-phosphate
  modified_base 8: mod_base = OTHER; note = 2'-O-methyluridine-3'-phosphate
  modified_base 9: mod_base = OTHER; note = 2'-deoxy-2'-fluorouridine-3'-phosphate
  modified_base 10: mod_base = OTHER; note = 2'-deoxy-2'-fluorocytidine-3'-phosphate
  modified_base 11: mod_base = OTHER; note = 2'-deoxy-2'-fluorouridine-3'-phosphate
  modified_base 12: mod_base = OTHER; note = 2'-O-methyluridine-3'-phosphate
  modified_base 13: mod_base = OTHER; note = 2'-O-methylguanosine-3'-phosphate
  modified_base 14: mod_base = OTHER; note = 2'-O-methylcytidine-3'-phosphate
  modified_base 15: mod_base = OTHER; note = 2'-O-methyluridine-3'-phosphate
  modified_base 16: mod_base = OTHER; note = 2'-O-methylcytidine-3'-phosphate
  modified_base 17: mod_base = OTHER; note = 2'-O-methyluridine-3'-phosphate
  modified_base 18: mod_base = OTHER; note = 2'-O-methyladenosine-3'-phosphate
  modified_base 19: mod_base = OTHER; note = 2'-O-methyluridine-3'-phosphate
  modified_base 20: mod_base = OTHER; note = 2'-O-methyladenosine-3'-phosphate
  modified_base 21: mod_base = OTHER; note = 2'-O-methyladenosine-3'-phosphate conjugated at the 3'-end to a tri-N-acetylgalactosamine ligand
aacagtgttcttgctctataa

SEQ ID NO: 696 - RNA, 23 nt, synthetic construct
  source 1..23: mol_type = other RNA
  modified_base 1: mod_base = OTHER; note = 2'-O-methyluridine-3'-phosphorothioate
  modified_base 2: mod_base = OTHER; note = 2'-deoxy-2'-fluorouridine-3'-phosphorothioate
  modified_base 3: mod_base = OTHER; note = 2'-O-methyladenosine-3'-phosphate
  modified_base 4: mod_base = OTHER; note = 2'-O-methyluridine-3'-phosphate
  modified_base 5: mod_base = OTHER; note = 2'-O-methyladenosine-3'-phosphate
  modified_base 6: mod_base = OTHER; note (2S,4R)-N-acetyl-2-hydroxymethyl-4-hydroxypyrrolidine 4-phosphate
  modified_base 7: mod_base = OTHER; note = 2'-O-methyladenosine-3'-phosphate
  modified_base 8: mod_base = OTHER; note = 2'-O-methylguanosine-3'-phosphate
  modified_base 9: mod_base = OTHER; note = 2'-O-methylcytidine-3'-phosphate
  modified_base 10: mod_base = OTHER; note = 2'-O-methyladenosine-3'-phosphate
  modified_base 11: mod_base = OTHER; note = 2'-O-methyladenosine-3'-phosphate
  modified_base 12: mod_base = OTHER; note = 2'-O-methylguanosine-3'-phosphate
  modified_base 13: mod_base = OTHER; note = 2'-O-methyladenosine-3'-phosphate
  modified_base 14: mod_base = OTHER; note = 2'-deoxy-2'-fluoroadenosine-3'-phosphate
  modified_base 15: mod_base = OTHER; note = 2'-O-methylcytidine-3'-phosphate
  modified_base 16: mod_base = OTHER; note = 2'-deoxy-2'-fluoroadenosine-3'-phosphate
  modified_base 17: mod_base = OTHER; note = 2'-O-methylcytidine-3'-phosphate
  modified_base 18: mod_base = OTHER; note = 2'-O-methyluridine-3'-phosphate
  modified_base 19: mod_base = OTHER; note = 2'-O-methylguanosine-3'-phosphate
  modified_base 20: mod_base = OTHER; note = 2'-O-methyluridine-3'-phosphate
  modified_base 21: mod_base = OTHER; note = 2'-O-methyluridine-3'-phosphorothioate
  modified_base 22: mod_base = OTHER; note = 2'-O-methyluridine-3'-phosphorothioate
  modified_base 23: mod_base = OTHER; note = 2'-O-methyluridine
ttatanagcaagaacactgtttt

SEQ ID NO: 697 - RNA, 21 nt, synthetic construct
  source 1..21: mol_type = other RNA
  modified_base 1: mod_base = OTHER; note = 2'-O-methyladenosine-3'-phosphorothioate
  modified_base 2: mod_base = OTHER; note = 2'-O-methyladenosine-3'-phosphorothioate
  modified_base 3: mod_base = OTHER; note = 2'-O-methylcytidine-3'-phosphate
  modified_base 4: mod_base = OTHER; note = 2'-O-methyladenosine-3'-phosphate
  modified_base 5: mod_base = OTHER; note = 2'-O-methylguanosine-3'-phosphate
  modified_base 6: mod_base = OTHER; note = 2'-O-methyluridine-3'-phosphate
  modified_base 7: mod_base = OTHER; note = 2'-deoxy-2'-fluoroguanosine-3'-phosphate
  modified_base 8: mod_base = OTHER; note = 2'-O-methyluridine-3'-phosphate
  modified_base 9: mod_base = OTHER; note = 2'-deoxy-2'-fluorouridine-3'-phosphate
  modified_base 10: mod_base = OTHER; note = 2'-deoxy-2'-fluorocytidine-3'-phosphate
  modified_base 11: mod_base = OTHER; note = 2'-deoxy-2'-fluorouridine-3'-phosphate
  modified_base 12: mod_base = OTHER; note = 2'-O-methyluridine-3'-phosphate
  modified_base 13: mod_base = OTHER; note = 2'-O-methylguanosine-3'-phosphate
  modified_base 14: mod_base = OTHER; note = 2'-O-methylcytidine-3'-phosphate
  modified_base 15: mod_base = OTHER; note = 2'-O-methyluridine-3'-phosphate
  modified_base 16: mod_base = OTHER; note = 2'-O-methylcytidine-3'-phosphate
  modified_base 17: mod_base = OTHER; note = 2'-O-methyluridine-3'-phosphate
  modified_base 18: mod_base = OTHER; note = 2'-O-methyladenosine-3'-phosphate
  modified_base 19: mod_base = OTHER; note = 2'-O-methyluridine-3'-phosphate
  modified_base 20: mod_base = OTHER; note = 2'-O-methyladenosine-3'-phosphate
  modified_base 21: mod_base = OTHER; note = 2'-O-methyladenosine-3'-phosphate conjugated at the 3'-end to a tri-N-acetylgalactosamine ligand
aacagtgttcttgctctataa

SEQ ID NO: 698 - RNA, 23 nt, synthetic construct
  source 1..23: mol_type = other RNA
  modified_base 1: mod_base = OTHER; note = 2'-O-methyluridine-3'-phosphorothioate
  modified_base 2: mod_base = OTHER; note = 2'-deoxy-2'-fluorouridine-3'-phosphorothioate
  modified_base 3: mod_base = OTHER; note = 2'-O-methyladenosine-3'-phosphate
  modified_base 4: mod_base = OTHER; note = 2'-O-methyluridine-3'-phosphate
  modified_base 5: mod_base = OTHER; note = 2'-O-methyladenosine-3'-phosphate
  modified_base 6: mod_base = OTHER; note (2S,4R)-N-(2-(guanin-9-yl)-1-oxoethyl)-2-hydroxymethyl-4-hy droxypyrrolidine 4-phosphate
  modified_base 7: mod_base = OTHER; note = 2'-O-methyladenosine-3'-phosphate
  modified_base 8: mod_base = OTHER; note = 2'-O-methylguanosine-3'-phosphate
  modified_base 9: mod_base = OTHER; note = 2'-O-methylcytidine-3'-phosphate
  modified_base 10: mod_base = OTHER; note = 2'-O-methyladenosine-3'-phosphate
  modified_base 11: mod_base = OTHER; note = 2'-O-methyladenosine-3'-phosphate
  modified_base 12: mod_base = OTHER; note = 2'-O-methylguanosine-3'-phosphate
  modified_base 13: mod_base = OTHER; note = 2'-O-methyladenosine-3'-phosphate
  modified_base 14: mod_base = OTHER; note = 2'-deoxy-2'-fluoroadenosine-3'-phosphate
  modified_base 15: mod_base = OTHER; note = 2'-O-methylcytidine-3'-phosphate
  modified_base 16: mod_base = OTHER; note = 2'-deoxy-2'-fluoroadenosine-3'-phosphate
  modified_base 17: mod_base = OTHER; note = 2'-O-methylcytidine-3'-phosphate
  modified_base 18: mod_base = OTHER; note = 2'-O-methyluridine-3'-phosphate
  modified_base 19: mod_base = OTHER; note = 2'-O-methylguanosine-3'-phosphate
  modified_base 20: mod_base = OTHER; note = 2'-O-methyluridine-3'-phosphate
  modified_base 21: mod_base = OTHER; note = 2'-O-methyluridine-3'-phosphorothioate
  modified_base 22: mod_base = OTHER; note = 2'-O-methyluridine-3'-phosphorothioate
  modified_base 23: mod_base = OTHER; note = 2'-O-methyluridine
ttatagagcaagaacactgtttt

SEQ ID NO: 699 - RNA, 21 nt, synthetic construct
  source 1..21: mol_type = other RNA
  modified_base 1: mod_base = OTHER; note = 2'-O-methyladenosine-3'-phosphorothioate
  modified_base 2: mod_base = OTHER; note = 2'-O-methyladenosine-3'-phosphorothioate
  modified_base 3: mod_base = OTHER; note = 2'-O-methylcytidine-3'-phosphate
  modified_base 4: mod_base = OTHER; note = 2'-O-methyladenosine-3'-phosphate
  modified_base 5: mod_base = OTHER; note = 2'-O-methylguanosine-3'-phosphate
  modified_base 6: mod_base = OTHER; note = 2'-O-methyluridine-3'-phosphate
  modified_base 7: mod_base = OTHER; note = 2'-deoxy-2'-fluoroguanosine-3'-phosphate
  modified_base 8: mod_base = OTHER; note = 2'-O-methyluridine-3'-phosphate
  modified_base 9: mod_base = OTHER; note = 2'-deoxy-2'-fluorouridine-3'-phosphate
  modified_base 10: mod_base = OTHER; note = 2'-deoxy-2'-fluorocytidine-3'-phosphate
  modified_base 11: mod_base = OTHER; note = 2'-deoxy-2'-fluorouridine-3'-phosphate
  modified_base 12: mod_base = OTHER; note = 2'-O-methyluridine-3'-phosphate
  modified_base 13: mod_base = OTHER; note = 2'-O-methylguanosine-3'-phosphate
  modified_base 14: mod_base = OTHER; note = 2'-O-methylcytidine-3'-phosphate
  modified_base 15: mod_base = OTHER; note = 2'-O-methyluridine-3'-phosphate
  modified_base 16: mod_base = OTHER; note = 2'-O-methylcytidine-3'-phosphate
  modified_base 17: mod_base = OTHER; note = 2'-O-methyluridine-3'-phosphate
  modified_base 18: mod_base = OTHER; note = 2'-O-methyladenosine-3'-phosphate
  modified_base 19: mod_base = OTHER; note = 2'-O-methyluridine-3'-phosphate
  modified_base 20: mod_base = OTHER; note = 2'-O-methyladenosine-3'-phosphate
  modified_base 21: mod_base = OTHER; note = 2'-O-methyladenosine-3'-phosphate conjugated at the 3'-end to a tri-N-acetylgalactosamine ligand
aacagtgttcttgctctataa

SEQ ID NO: 700 - RNA, 23 nt, synthetic construct
  source 1..23: mol_type = other RNA
  modified_base 1: mod_base = OTHER; note = 2'-O-methyluridine-3'-phosphorothioate
  modified_base 2: mod_base = OTHER; note = 2'-deoxy-2'-fluorouridine-3'-phosphorothioate
  modified_base 3: mod_base = OTHER; note = 2'-O-methyladenosine-3'-phosphate
  modified_base 4: mod_base = OTHER; note = 2'-O-methyluridine-3'-phosphate
  modified_base 5: mod_base = OTHER; note = 2'-O-methyladenosine-3'-phosphate
  modified_base 6: mod_base = OTHER; note = 2'-deoxy-2'-fluoroguanosine-3'-phosphate
  modified_base 7: mod_base = OTHER; note (2S,4R)-N-acetyl-2-hydroxymethyl-4-hydroxypyrrolidine 4-phosphate
  modified_base 8: mod_base = OTHER; note = 2'-O-methylguanosine-3'-phosphate
  modified_base 9: mod_base = OTHER; note = 2'-O-methylcytidine-3'-phosphate
  modified_base 10: mod_base = OTHER; note = 2'-O-methyladenosine-3'-phosphate
  modified_base 11: mod_base = OTHER; note = 2'-O-methyladenosine-3'-phosphate
  modified_base 12: mod_base = OTHER; note = 2'-O-methylguanosine-3'-phosphate
  modified_base 13: mod_base = OTHER; note = 2'-O-methyladenosine-3'-phosphate
  modified_base 14: mod_base = OTHER; note = 2'-deoxy-2'-fluoroadenosine-3'-phosphate
  modified_base 15: mod_base = OTHER; note = 2'-O-methylcytidine-3'-phosphate
  modified_base 16: mod_base = OTHER; note = 2'-deoxy-2'-fluoroadenosine-3'-phosphate
  modified_base 17: mod_base = OTHER; note = 2'-O-methylcytidine-3'-phosphate
  modified_base 18: mod_base = OTHER; note = 2'-O-methyluridine-3'-phosphate
  modified_base 19: mod_base = OTHER; note = 2'-O-methylguanosine-3'-phosphate
  modified_base 20: mod_base = OTHER; note = 2'-O-methyluridine-3'-phosphate
  modified_base 21: mod_base = OTHER; note = 2'-O-methyluridine-3'-phosphorothioate
  modified_base 22: mod_base = OTHER; note = 2'-O-methyluridine-3'-phosphorothioate
  modified_base 23: mod_base = OTHER; note = 2'-O-methyluridine
ttatagngcaagaacactgtttt

SEQ ID NO: 701 - RNA, 21 nt, synthetic construct
  source 1..21: mol_type = other RNA
  modified_base 1: mod_base = OTHER; note = 2'-O-methyladenosine-3'-phosphorothioate
  modified_base 2: mod_base = OTHER; note = 2'-O-methyladenosine-3'-phosphorothioate
  modified_base 3: mod_base = OTHER; note = 2'-O-methylcytidine-3'-phosphate
  modified_base 4: mod_base = OTHER; note = 2'-O-methyladenosine-3'-phosphate
  modified_base 5: mod_base = OTHER; note = 2'-O-methylguanosine-3'-phosphate
  modified_base 6: mod_base = OTHER; note = 2'-O-methyluridine-3'-phosphate
  modified_base 7: mod_base = OTHER; note = 2'-deoxy-2'-fluoroguanosine-3'-phosphate
  modified_base 8: mod_base = OTHER; note = 2'-O-methyluridine-3'-phosphate
  modified_base 9: mod_base = OTHER; note = 2'-deoxy-2'-fluorouridine-3'-phosphate
  modified_base 10: mod_base = OTHER; note = 2'-deoxy-2'-fluorocytidine-3'-phosphate
  modified_base 11: mod_base = OTHER; note = 2'-deoxy-2'-fluorouridine-3'-phosphate
  modified_base 12: mod_base = OTHER; note = 2'-O-methyluridine-3'-phosphate
  modified_base 13: mod_base = OTHER; note = 2'-O-methylguanosine-3'-phosphate
  modified_base 14: mod_base = OTHER; note = 2'-O-methylcytidine-3'-phosphate
  modified_base 15: mod_base = OTHER; note = 2'-O-methyluridine-3'-phosphate
  modified_base 16: mod_base = OTHER; note = 2'-O-methylcytidine-3'-phosphate
  modified_base 17: mod_base = OTHER; note = 2'-O-methyluridine-3'-phosphate
  modified_base 18: mod_base = OTHER; note = 2'-O-methyladenosine-3'-phosphate
  modified_base 19: mod_base = OTHER; note = 2'-O-methyluridine-3'-phosphate
  modified_base 20: mod_base = OTHER; note = 2'-O-methyladenosine-3'-phosphate
  modified_base 21: mod_base = OTHER; note = 2'-O-methyladenosine-3'-phosphate conjugated at the 3'-end to a tri-N-acetylgalactosamine ligand
aacagtgttcttgctctataa

SEQ ID NO: 702 - RNA, 23 nt, synthetic construct
  source 1..23: mol_type = other RNA
  modified_base 1: mod_base = OTHER; note = 2'-O-methyluridine-3'-phosphorothioate
  modified_base 2: mod_base = OTHER; note = 2'-deoxy-2'-fluorouridine-3'-phosphorothioate
  modified_base 3: mod_base = OTHER; note = 2'-O-methyladenosine-3'-phosphate
  modified_base 4: mod_base = OTHER; note = 2'-O-methyluridine-3'-phosphate
  modified_base 5: mod_base = OTHER; note = 2'-O-methyladenosine-3'-phosphate
  modified_base 6: mod_base = OTHER; note = 2'-deoxy-2'-fluoroguanosine-3'-phosphate
  modified_base 7: mod_base = OTHER; note (2S,4R)-N-(2-(adenin-9-yl)-1-oxoethyl)-2-hydroxymethyl-4-hy droxypyrrolidine 4-phosphate
  modified_base 8: mod_base = OTHER; note = 2'-O-methylguanosine-3'-phosphate
  modified_base 9: mod_base = OTHER; note = 2'-O-methylcytidine-3'-phosphate
  modified_base 10: mod_base = OTHER; note = 2'-O-methyladenosine-3'-phosphate
  modified_base 11: mod_base = OTHER; note = 2'-O-methyladenosine-3'-phosphate
  modified_base 12: mod_base = OTHER; note = 2'-O-methylguanosine-3'-phosphate
  modified_base 13: mod_base = OTHER; note = 2'-O-methyladenosine-3'-phosphate
  modified_base 14: mod_base = OTHER; note = 2'-deoxy-2'-fluoroadenosine-3'-phosphate
  modified_base 15: mod_base = OTHER; note = 2'-O-methylcytidine-3'-phosphate
  modified_base 16: mod_base = OTHER; note = 2'-deoxy-2'-fluoroadenosine-3'-phosphate
  modified_base 17: mod_base = OTHER; note = 2'-O-methylcytidine-3'-phosphate
  modified_base 18: mod_base = OTHER; note = 2'-O-methyluridine-3'-phosphate
  modified_base 19: mod_base = OTHER; note = 2'-O-methylguanosine-3'-phosphate
  modified_base 20: mod_base = OTHER; note = 2'-O-methyluridine-3'-phosphate
  modified_base 21: mod_base = OTHER; note = 2'-O-methyluridine-3'-phosphorothioate
  modified_base 22: mod_base = OTHER; note = 2'-O-methyluridine-3'-phosphorothioate
  modified_base 23: mod_base = OTHER; note = 2'-O-methyluridine
ttatagagcaagaacactgtttt

SEQ ID NO: 703 - DNA, 20 bp, synthetic construct
  source 1..20: mol_type = other DNA
  modified_base 19: mod_base = OTHER; note = 2'-deoxythymidine-3'-phosphorothioate
  modified_base 20: mod_base = OTHER; note = unlocked nucelic acid - 2', 3', or 5'-methyl or 4'-methoxy steroisomer
  misc_feature 20: note = RNA
  misc_feature 1..19: note = DNA
tttttttttttttttttttt

SEQ ID NO: 704 - DNA, 20 bp, synthetic construct
  source 1..20: mol_type = other DNA
  modified_base 19: mod_base = OTHER; note = unlocked nucelic acid - 2', 3', or 5'-methyl or 4'-methoxy steroisomer, 3'-phosphorothioate
  misc_feature 19: note = RNA
  misc_feature 1..18: note = DNA
tttttttttttttttttttt

SEQ ID NO: 705 - DNA, 20 bp, synthetic construct
  source 1..20: mol_type = other DNA
  modified_base 19: mod_base = OTHER; note = 2'-deoxythymidine-3'-phosphorothioate
  modified_base 20: mod_base = OTHER; note = 1-deoxy-1-(thymin-1-yl)-alpha-L-threofuranose
  misc_feature 20: note = RNA
  misc_feature 1..19: note = DNA
tttttttttttttttttttt

SEQ ID NO: 706 - DNA, 20 bp, synthetic construct
  source 1..20: mol_type = other DNA
  modified_base 19: mod_base = OTHER; note = 1-deoxy-1-(thymin-1-yl)-alpha-L-threofuranose 2-phosphorothioate
  modified_base 20: mod_base = OTHER; note = 1-deoxy-1-(thymin-1-yl)-alpha-L-threofuranose
  misc_feature 19..20: note = RNA
  misc_feature 1..18: note = DNA
tttttttttttttttttttt

SEQ ID NO: 707 - DNA, 20 bp, synthetic construct
  source 1..20: mol_type = other DNA
  modified_base 1: mod_base = OTHER; note = 1-deoxy-1-(thymin-1-yl)-alpha-L-threofuranose 2-phosphorothioate
  misc_feature 1: note = RNA
  misc_feature 2..20: note = DNA
tttttttttttttttttttt

SEQ ID NO: 708 - DNA, 20 bp, synthetic construct
  source 1..20: mol_type = other DNA
  modified_base 19: mod_base = OTHER; note = 2'-deoxythymidine-3'-phosphorothioate
tttttttttttttttttttt

SEQ ID NO: 709 - DNA, 20 bp, synthetic construct
  source 1..20: mol_type = other DNA
  modified_base 19: mod_base = OTHER; note = 2'-deoxy-2'-fluorouridine-3'-phosphorothioate
  modified_base 20: mod_base = OTHER; note = 2'-deoxy-2'-fluorouridine
  misc_feature 19..20: note = RNA
  misc_feature 1..18: note = DNA
tttttttttttttttttttt

SEQ ID NO: 710 - DNA, 20 bp, synthetic construct
  source 1..20: mol_type = other DNA
  modified_base 19: mod_base = OTHER; note 2'-deoxy-2'-fluoro-5'-(S)-methyl-uridine-3'-phosphorothioat e
  modified_base 20: mod_base = OTHER; note = 2'-deoxy-2'-fluoro-5'-(S)-methyl-uridine
  misc_feature 19..20: note = RNA
  misc_feature 1..18: note = DNA
tttttttttttttttttttt

SEQ ID NO: 711 - DNA, 20 bp, synthetic construct
  source 1..20: mol_type = other DNA
  modified_base 19: mod_base = OTHER; note 2'-deoxy-2'-fluoro-5'-(R)-methyl-uridine-3'-phosphorothioat e
  modified_base 20: mod_base = OTHER; note = 2'-deoxy-2'-fluoro-5'-(R)-methyl-uridine
  misc_feature 19..20: note = RNA
  misc_feature 1..18: note = DNA
tttttttttttttttttttt

SEQ ID NO: 712 - DNA, 20 bp, synthetic construct
  source 1..20: mol_type = other DNA
  modified_base 19: mod_base = OTHER; note = unlocked nucelic acid - 2', 3', or 5'-methyl or 4'-methoxy steroisomer, 3'-phosphorothioate
  modified_base 20: mod_base = OTHER; note = unlocked nucelic acid - 2', 3', or 5'-methyl or 4'-methoxy steroisomer
  misc_feature 19..20: note = RNA
  misc_feature 1..18: note = DNA
tttttttttttttttttttt

SEQ ID NO: 713 - DNA, 20 bp, synthetic construct
  source 1..20: mol_type = other DNA
  modified_base 1: mod_base = OTHER; note = unlocked nucelic acid - 2', 3', or 5'-methyl or 4'-methoxy steroisomer, 3'-phosphate
  misc_feature 1: note = RNA
  misc_feature 2..20: note = DNA
tttttttttttttttttttt

SEQ ID NO: 714 - DNA, 20 bp, synthetic construct
  source 1..20: mol_type = other DNA
  modified_base 1: mod_base = OTHER; note = unlocked nucelic acid - 2', 3', or 5'-methyl or 4'-methoxy steroisomer, 3'-phosphorothioate
  misc_feature 1: note = RNA
  misc_feature 2..20: note = DNA
tttttttttttttttttttt
